(19) United States
(12) Patent Application Publication
(10) Pub. No.: US 2023/0176038 A1
(43) Pub. Date: Jun. 8, 2023

(54) Methods for Identifying Modulators of Insect Transient Receptor Potential Channels

(71) Applicant: BASF Corporation, Florham Park, NJ (US)

(72) Inventors: Alexandre NESTEROV, Chapel Hill, NC (US); Ramani KANDASAMY, Chapel Hill, NC (US); Lynn F. STAM, Raleigh, NC (US)

(21) Appl. No.: 17/787,968

(22) PCT Filed: Dec. 10, 2020
(86) PCT No.: PCT/US2020/064296

§ 371 Date: Jun. 22, 2022

Related U.S. Application Data
(60) Provisional application No. 62/952,756, filed on Dec. 23, 2019.

(51) Int. Cl. G01N 33/50

(52) U.S. Cl. CPC G01N 33/5041; G01N 2333/43552

(57) ABSTRACT

The present invention relates to a screening method for determining whether or not a candidate compound is a modulator of a complex consisting of the insect transient receptor potential channel Nanchung protein and the insect transient receptor potential channel Water witch protein. The present invention further relates to a screening method for determining whether or not a candidate compound directly binds to the complex consisting of the Nanchung protein and Water witch protein. The present invention further relates to a screening method for determining whether or not a candidate compound is a modulator of the insect Water witch protein. The present invention further provides a method of insect control by applying an insect-specific TRP channel modulator determined by the screening method. The present invention further provides a method of classifying an insecticide compound by its mode of action using the binding assay and/or a functional assay.

### CROSS-REFERENCE TO RELATED APPLICATION

[0001] This application claims the benefit of U.S. Provisional Pat. Application No. 62/952,756, filed Dec. 23, 2019, which is incorporated by reference herein in its entirety.

### SUBMISSION OF SEQUENCE LISTING

[0002] The Sequence Listing associated with this application is filed in electronic format via EFS-Web and hereby incorporated by reference into the specification in its entirety. The name of the text file containing the Sequence Listing is “SEQ LISTING 180852WO01.” The size of the text file is 702 KB, and the text file was created on Dec. 8, 2020.

### BACKGROUND

[0003] The present invention relates to compositions and methods of insect control. The present invention generally relates to methods for determining agents that directly bind to and/or modulate a biological activity of the insect transient receptor potential A (TRPA) Water witch protein and/or complexes consisting of the insect transient receptor potential V (TRPV) Nanchung protein and the insect transient receptor potential A (TRPA) Water witch protein. The present invention also relates to compositions and methods of mode of action classification for an insecticide composition comprising a compound capable of modulating biological activity of the insect transient receptor potential A (TRPA) Water witch protein and/or complexes consisting of the insect transient receptor potential V (TRPV) Nanchung protein and the insect transient receptor potential A (TRPA) Water witch protein in a cell. The present invention further relates to compositions and methods of mode of action classification for an insecticide composition comprising a compound capable of directly binding complexes consisting of the insect transient receptor potential V (TRPV) Nanchung protein and the insect transient receptor potential A (TRPA) Water witch protein.

[0004] Almost all field crops, plants, and commercial farming areas are susceptible to attacks by plant insect pests. Plant insect pests are a major factor in the loss of the world’s commercially important agricultural crops resulting both, in economic hardship to farmers and nutritional deprivation for local populations in many parts of the world. In other words, insect pests cause great loses and damages to human agriculture, food supply, post-harvest storage, horticulture, animal health and public health.

[0005] While advances have been made in the control of these insects, these insects have been able to adopt and evade the control measures, resulting in resistant insect populations (Perry et al., 2011). As a result, there remains a need for better understanding of the mechanisms that underlie feeding and other behaviors of insect pests. Such knowledge would allow for the design of agents and strategies for intervening or preventing attacks on field crops, plants, and commercial farming areas by the insect pests or prevent spreading of human and animal diseases.

[0006] Broad spectrum chemical pesticides and insecticides have been used extensively to control or eradicate insect pests. There is, however, substantial interest in identifying and/or developing effective alternative insecticides. As such, effective methods for screening of the new insecticides would be desirable.

[0007] Several species or arthropods, including mosquitos, flies, ticks, midges and flees transmit variety of pathogenic viruses and parasites. Widely used insect repellents such as DEET, picaridin and permethrin have raised several concerns in terms of environmental and health risks (Lee, 2018). There is, therefore, substantial interest in developing new methods to screen for efficient repellents with potentially low toxisity to health and environment.

[0008] What are needed, then, are new methods that can be employed in screening for agents capable of binding to and/or modulating biological activity of the insect transient receptor potential A (TRPA) Water witch protein and/or complexes consisting of the insect transient receptor potential V (TRPV) Nanchung protein and the insect transient receptor potential A (TRPA) Water witch protein, which, in some cases can modulate insect behavior and act as insecticides and/or insect repellents.

### SUMMARY

[0009] The present invention relates to a method for determining the mode of action classification for the candidate compound according to the Insecticide Resistance Action Committee (IRAC) using one or more of the following: functional assay and/or binding assay.

[0010] For example, in certain embodiments, a functional assay may be used to determine whether a candidate compound acts as a modulator of the insect transient receptor potential A (TRPA) Water witch protein and/or complexes consisting of the insect transient receptor potential V (TRPV) Nanchung protein and the insect transient receptor potential A (TRPA) Water witch protein in a cell.

[0011] In yet another embodiment, a functional assay may be used to determine whether or not a candidate compound acts in a similar way as endogenous modulator of complexes consisting of the insect transient receptor potential V (TRPV) Nanchung protein and the insect transient receptor potential V (TRPV) Inactive protein in a cell.

[0012] In yet another embodiment, a functional assay may be used to determine whether or not a candidate compound acts in a similar way as endogenous modulator of complexes consisting of the insect transient receptor potential V (TRPV) Nanchung protein and the insect transient receptor potential A (TRPA) Water witch protein in a cell.

[0013] The functional assay may include at least one of the following steps: (1) detecting calcium ion mobilization in the first cell in response to the candidate compound or endogenous modulator, (2) detecting a membrane potential in the first cell in response to the candidate compound on endogenous modulator, (3) comparing calcium ion mobilization in the first cell in the absence of the candidate compound or endogenous modulator with calcium ion mobilization in the first cell in the presence of the candidate compound or endogenous modulator, (4) comparing a membrane potential in the first cell in the absence of the candidate compound or endogenous modulator with a membrane potential in the first cell in the presence of the candidate compound or endogenous modulator, (5) comparing calcium ion mobilization in the first cell in the presence of the candidate compound or endogenous modulator with calcium ion mobilization reference level indicative of no modulation of the TPRV channel, and/or TRPA channel, and/or complexes consisting of the insect transient receptor potential V (TRPV) and the insect transient receptor potential A (TRPA) channel (6) comparing a membrane potential in the first cell in the presence of the candidate compound or endogenous modulator with a membrane potential reference level indicative of no modulation of the TPRV channel and or TRPA channel and/or complexes consisting of the insect transient receptor potential V (TRPV) channel and the insect transient receptor potential A (TRPA) channel. Preferably, the candidate compound or endogenous modulator may modulate the calcium ion mobilization or the membrane potential in the first cell by at least 20% relative to the reference level. The candidate compound or endogenous modulator may be a modulator that inhibits the activities of the insect TRPV channel and/or the insect TRPA channel and/or complexes consisting of the insect transient receptor potential V (TRPV) channel and the insect transient receptor potential A (TRPA) channel. Alternatively, the candidate compound or endogenous modulator may be a modulator that activates the insect TRPV channel and or TRPA channel and/or complexes consisting of the insect transient receptor potential V (TRPV) channel and the insect transient receptor potential A (TRPA) channel. The candidate compound may be a modulator that kills insects and/or inhibits insect feeding and/or perturbs insect behaviour.

[0014] In another embodiment a bininding assay may be used to determine if the candidate compound binds directly to complexes consisting of transient receptor potential (TRPV) proteins and transient receptor potential A (TRPA) proteins.

[0015] In another embodiment a binding assay can be used to determine whether or not a candidate compound binds to the same site as endogenous modulator of complexes consisting of the insect transient receptor potential V (TRPV) proteins and the insect transient receptor potential A (TRPA) proteins.

[0016] In another embodiment a binding assay can be used to determine whether or not a candidate compound binds to the same site as endogenous modulator of complexes or channels consisting of transient receptor potential (TRPV) proteins and transient receptor potential A (TRPA) proteins.

[0017] In another embodiment a binding assay can be used to determine whether or not a two or more candidate compounds binds to the same or different sites on complexes formed by the transient receptor potential (TRPV) proteins and transient receptor potential A (TRPA) proteins.

[0018] A binding assay may include (1) providing one or more Nanchung proteins, transient receptor potential V (TRPV) Inactive proteins, and/or transient receptor potential A (TRPA) Water witch proteins which may be located in a cell, derived from a cell, produced by a cell or produced in a cell-free system; (2) contacting the one or more TRPV Nanchung proteins, and/or TRPV Inactive proteins, and/or TRPA Water witch proteins and/or complexes consisting of the insect transient receptor potential V (TRPV) Nanchung protein and the insect transient receptor potential A (TRPA) Water witch protein wherein the binding affinity of the candidate compound is indicative of the candidate compound’s ability to directly bind to one or more Nanchung proteins, TRPV Inactive proteins and/or TRPA Water witch proteins, and/or complexes consisting of the insect transient receptor potential V (TRPV) Nanchung protein and the insect transient receptor potential A (TRPA) Water witch protein.

[0019] For example, in certain embodiments, the binding assay step may include at least one of the following steps: (1) contacting the one or more TRPV Nanchung proteins and/or TRPV Inactive proteins and/or TRPA Water witch proteins and/or complexes consisting of TRPV Nanchung protein and TRPA Water witch protein with a compound, wherein the compound may be labeled or unlabeled; (2) measuring the amount of the compound which is bound to the one or more Nanchung proteins, TRPV Inactive proteins and/or TRPA Water witch proteins, and/or complexes consisting of TRPV Nanchung protein and TRPA Water witch protein protein; (3) calculating the equilibrium dissociation constant (K_{d}) for the one or more compounds; (4) wherein the K_{d} may be determined using one or more of the following methods: (I)(a) maximum binding (Bₘₐₓ) and (b) the concentration of labeled compound needed to reach 50% of maximum binding, (II) fluorescence polarization assay, (III) surface plasmon resonance, (IV) isothermal calorimetry, (V) Schild analysis; (5) contacting the one or more Nanchung proteins, and/or TRPV Inactive proteins and/or TRPA Water witch proteins and/or complexes consisting of TRPV Nanchung protein and TRPA Water witch protein with a labeled compound having high affinity to one or more Nanchung proteins, and/or TRPV Inactive proteins and/or TRPA Water witch proteins and/or complexes consisting of TRPV Nanchung protein and TRPA Water witch protein; (6) contacting the one or more Nanchung proteins, TRPV Inactive proteins and/or TRPA Water witch proteins, one or more Nanchung proteins, and/or TRPV Inactive proteins and/or TRPA Water witch proteins and/or complexes consisting of TRPV Nanchung protein and TRPA Water witch protein with a candidate compound or endogenous modulator in the presence of the labeled compound of step 1; (7) increasing the amount of the candidate compound or endogenous modulator available to contact the one or more Nanchung proteins, TRPV Inactive proteins and/or TRPA Water witch proteins, one or more Nanchung proteins, and/or TRPV Inactive proteins and/or TRPA Water witch proteins and/or complexes consisting of TRPV Nanchung protein and TRPA Water witch protein until binding of the labeled compound is near 0%; (8) calculating the equilibrium inhibition constant (Ki) and/or the equilibrium dissociation constant (K_{d}) for competition assay using one or more of the following methods: (I) (a) determining amount of bound labeled compound in the absence of the candidate compound or endogenous modulator and (b) determining concentration of the candidate compound or endogenous modulator that is required to reduce the amount of bound labeled compound by 50%, (II) fluorescent polarization assay, and/or (III) Schild analysis; (9) comparing the inhibition constant of the candidate compounds or endogenous modulator to other candidate compounds; (10) comparing the inhibition constant of the candidate compounds or endogenous modulator to the dissociation constant of the labeled compound; (11) comparing the inhibition constant of the candidate compound to the inhibition constant of the one or more candidate compounds.

[0020] In the methods set forth herein, the one or more insect TRPV channels and/or the one or more insect TRPA channels may comprise one or more TRPV proteins and/or one or more TRPA proteins in a complex. In the methods set forth herein, the one or more insect TRPV channels and/or TRPA channels may comprise one or more Nanchung proteins, Inactive proteins, Water witch proteins, and/or Nanchung and Inactive protein complexes, and/or Nanchung and Water witch protein complexes. For clarity, the TRPV and/or TRPA channels may also comprise a Nanchung protein and/or Inactive proteins and/or Water witch one or more Nanchung proteins, and/or TRPV Inactive proteins and/or TRPA Water witch proteins and/or complexes consisting of TRPV Nanchung protein and TRPA Water witch proteins found in cellular membranes, inserted in artificial membranes, inserted in Nanchungodisks, solubilized in detergents, solubilized in non-detergent polymers, solubilized in amphipols and/or produced in a cell-free system. It is to be understood that the Nanchung, Inactive, and Water witch, proteins and/or one or more Nanchung proteins, and/or TRPV Inactive proteins and/or TRPA Water witch proteins and/or complexes consisting of TRPV Nanchung protein and TRPA Water witch protein may be found in cellular membranes, in solution, or in a cell-free system. It is to be understood that the Nanchung protein , Inactive protein, Water witch protein, and/or complexes consisting of TRPV Nanchung protein and TRPA Water witch protein may be contained within one or more cellular membranes, one or more pieces of cellular membranes, produced in a cellular system, produced in a cell-free system, and/or from cultured cells in a petri dish, or from cells or tissues derived from experimental animals or experimental insects. For purposes of determining whether a candidate compound directly binds to the insect TRPV proteins and/or TRPA proteins the TRPV and/or TRPA channels may comprise one or more Nanchung, Inactive or Water witch proteins.

[0021] It is to be understood that Nanchung and Inactive proteins are both insect TRPV proteins. Water witch is insect TRPA protein. Nanchung proteins may form a complex with Inactive proteins and/or Water witch proteins. The candidate compound may be a small organic molecule, small inorganic molecule, polysaccharides, peptides, proteins, nucleic acids, an extract made from biological materials, and any combination thereof. The endogenous modulator may be a small organic molecule, small inorganic molecule, polysaccharides, peptides, proteins, nucleic acids, an extract made from biological materials, and any combination thereof.

[0022] In another embodiment, the methods set forth above may use one or more of the following compounds as the labeled compound: afidopyropen, pymetrozine, and/or N-deacetylated form of pyrifluquinazon.

[0023] In yet another embodiment, the present invention relates to a candidate compound selected by the methods described above. The candidate compound may be a modulator that inhibits or increases the activity of the insect TRPV channel or insect TRPA channel. The candidate compound may be a modulator that acts as repellent and/or inhibits a feeding behavior of an insect. Even further, the candidate compound may modulate and/or bind directly to the one or more TRPV Nanchung proteins and/or, TRPV Inactive proteins and/or TRPA proteins, and/or complexes consisting of TRPV Nanchung proteins and TRPV Inactive proteins and/or complexes consisting of TRPV Nanchung proteins and TRPA Water witch proteins. The candidate compound may further modulate and/or bind directly to one or more insect Nanchung TRPV proteins, and/or insect TRPV Inactive proteins and/or insect TRPA Water witch proteins, and/or complexes consisting of TRPV Nanchung proteins and TRPV Inactive proteins and/or complexes consisting of TRPV Nanchung proteins and TRPA Water witch proteins and in particular to the same site on insect Nanchung TRPV proteins, and/or insect TRPV Inactive proteins and/or insect TRPA Water witch proteins, and/or complexes consisting of TRPV Nanchung proteins and TRPV Inactive proteins and/or complexes consisting of TRPV Nanchung proteins and TRPA Water witch proteins. The candidate compound may further modulate and/or bind directly to one or more arthropod Nanchung TRPV proteins, and/or arthropod TRPV Inactive proteins and/or arthropod TRPA Water witch proteins, and/or complexes consisting of arthropod TRPV Nanchung proteins and arthropod TRPV Inactive proteins and/or complexes consisting of arthropod TRPV Nanchung proteins and arthropod TRPA Water witch proteins. The candidate compound may further modulate and/or bind directly to one or more nematode Nanchung TRPV proteins, and/or nematode TRPV Inactive proteins and/or nematode TRPA Water witch proteins, and/or complexes consisting of nematode TRPV Nanchung proteins and nematode TRPV Inactive proteins and/or complexes consisting of nematode TRPV Nanchung proteins and nematode TRPA Water witch proteins and/or other non-target/non-pest species.

[0024] In another embodiment, the present invention relates to a composition containing the candidate compound identified by one or more of the methods set forth herein.

[0025] In another embodiment, the present invention relates to a method of insect control that includes applying to an insect or to an insects habitat, feeding source, and/or environment/habitat a composition comprising the candidate compound selected by one or more of the methods described herein or a compound selected by one or more of the methods described above. The compound may be an inhibitor of an insect TRPV and/or TRPA channel. The compound may be an activator of an insect TRPV and or TRPA channel. The compound may bind directly to the insect Nanchung protein, and or Water witch protein. The insect may be an agricultural/horticultural pest or a disease vector or a parasite.

### BRIEF DESCRIPTION OF THE DRAWINGS

[0026] FIG. 1 depicts a schematic illustration of the expression cassette for insect TRP channels in an adenovirus expression vector.

[0027] FIGS. 2A and 2B depict dose response relationships of calcium responses evoked by afidopyropen (AP), and pymetrozine (PM), but not Flonicamid (FL) or TFNA-AM in cells co-expressing Water witch and Nanchung (Wtrw + Nan), but not in cells expressing Water witch alone (Wtrw).

[0028] FIG. 3 depicts physical association between Nanchung (Nan-HA) and Water witch (Wtrw-FLAG) proteins in co-immunoprecipitation experiment.

[0029] FIG. 4A depicts activation of Ca²⁺ mobilization as a function of time by endogenous agonist, nicotinamide in mammalian cells co-expressing Nanchung and Inactive (Nan + Iav), or in mammalian cells co-expressing Nanchung and Water witch (Nan + Wtrw) but not in parental mammalian cells (cells are cells prior to infection with the genes or proteins of interest), nor in cells co-expressing Inactive and Water witch (Iav + Wtrw), no in cells expressing Nanchung (Nan), Inactive (Iav) or Water witch (Wtrw) individually. FIG. 4B depicts dose response relationships of calcium responses evoked by nicotinamide in cells co-expressing Nanchung and Inactive (Nan + Iav) or cells co-expressing Nanchung and Water witch (Nan + Wtrw).

[0030] FIG. 5A depicts [3H]-afidopyropen saturation binding to Nanchung (Nan) protein alone, Water witch (Wtrw) protein alone and complexes formed by Nanchung protein and Water witch protein (Nan + Wtrw). Binding affinities (K_{d}) are shown in parenthesis. FIG. 5B depicts Scatchard transformation of the saturation binding and increased binding affinity of complexes formed by Nanchung protein and Water witch protein (Nan + Wtrw), as compared to Nanchung protein individually (Nan).

[0031] FIG. 6A depicts competition between [³H]-afidopyropen and unlabeled pymetrozine for binding to complexes formed by Nunchung protein and Inactive protein or complexes formed by Nanchung protein and Water witch protein. FIG. 6B depicts competition between [³H]-afidopyropen and unlabeled nicotinamide for binding to complexes formed by Nunchung protein and Inactive protein or complexes formed by Nanchung protein and Water witch protein.

[0032] FIGS. 7A and 7B depict activation of Ca2+ mobilization by plant-derived deterrents cinnamaldehyde (A), and allyl isothiocyanate (B) in mammalian cells expressing Water witch protein (Wtrw), in cells co-expressing Nanchung and Water witch proteins (Nan + Wtrw) , and in cells co-expressing Inactive and Water witch, but not in parental mammalian cells, nor in cells expressing Nancung (Nan), Inactive (Iav), or cells co-expressing Nanchung and Inactive proteins (Nan + Iav).

[0033] FIG. 8 depicts amino acid alignment between homologous regions of Inactive (Iav) and Water witch (Wtrw) proteins and shows limited (22%) identity. Horisontal bars indicate positions of predicted transmembrane domains.

[0034] FIGS. 9A through 9K depict sequence alignments of the Nanchung proteins (SEQ ID NOS 64-90), all respectively, in order of appearance.

[0035] FIGS. 10A through 10J depict sequence alignments of the Water witch proteins (SEQ ID NOS 91-126), all respectively, in order of appearance.

[0036] FIG. 11 depicts an alignment tree for Nanchung proteins.

[0037] FIG. 12 depicts an alignment tree for Water witch proteins.

### DETAILED DESCRIPTION OF THE DRAWINGS AND THE PRESENTLY PREFERRED EMBODIMENTS

### I. General Considerations

[0038] The transient receptor potential (TRP) channels constitute a large and important class of channels involved in modulating cellular homeostasis (Wu et al., 2010). The present invention provides methods and compositions that identify or include one or more compounds or endogenous modulators that bind to and/or modulate at least one TRP family member, including, but not limited to TRPV and TRPA channels in an insect.

[0039] Specifically, the present invention provides methods for identifying candidate compounds or endogenous modulators capable of directly binding and modulating protein complexes consisting of TRPV protein Nanchung and TRPA protein Water witch.

[0040] The present invention further provides methods for identifying candidate compounds capable of directly modulating TRPA protein Water witch.

[0041] Modulating an insect TRPV and/or TRPA channels may modulate calcium homeostasis, sodium homeostasis, intracellular calcium levels, membrane polarization (resting membrane potential), and/or cation levels in a cell. Compounds that can modulate one or more insect TRPV and/or insect TRPA proteins and/or complexes formed by the insect TRPV proteins and TRPA proteins are useful in many aspects including, but not limited to, insect control. Knowing wether or not a compound directly binds or modulates TRPV proteins and/or TRPA proteins and/or complexes formed by the insect TRPV proteins and TRPA proteins and knowing wheter or not compounds bind to the same or different sites of an insect TRPV protein and/or insect TRPA protein and/or complexes formed by the insect TRPV proteins and TRPA proteins is critical for insect management planning and preventing the development of resistant insect populations.

[0042] The present invention identifies afidopyropen, pymetrozine and endogenous compound nicotinamide modulating biological activity of complexes formed by the insect TRPV Nanchung protein and insect TRPA Water witch protein for purposes of the determination of the biological activity by the calcium mobilization assay set herein.

[0043] The present invention further identifies cinnamaldehyde, and allyl isothiocyanate modulating biological activity of TRPA Water witch protein and/or complexes formed by the insect TRPV Nanchung protein and insect TRPA Water witch protein for purposes of the determination of the biological activity by the calcium mobilization assay set herein.

[0044] The present invention further identifies afidopyropen having affinity to complexes or channels consisting of TRPV Nanchung protein and TRPA Water witch protein such that one or more of the compounds above may be used in the methods presented herein as a labeled compound for purposes of the determination of the binding affinity of a labeled compound by saturation binding assay set forth herein.

[0045] The present invention further identifies afidopyropen, pymetrozine and endogenous modulator nicotinamide as compounds having affinity to complexes or channels consisting of TRPV Nanchung protein and TRPA Water witch such that one or more of the compounds above may be used as a labeled compound and another one used as unlabeled compound for purposes of the determination of binding affinity of unlabeled compound by competition binding assay set forth herein.

[0046] The present invention also provides compositions comprising the candidate compounds identified herein for use as insecticides and/or insect repellents for treating pests, plants and crops. The present invention further comprises classifying the candidate compounds identified herein by their mode of action.

[0047] Without being bound by theory, the modulation of an insect TRPV proteins, and/or TRPA proteins and/or complexes formed by the insect TRPV proteins and insect TRPA proteins elicits signaling pathway that brings forth sensory neuron modulation which may kill insects, alter insect behavior or repel insects. Thus, again without being bound by theory, it is believed that compounds that modulate (e.g., activate) an insect TRPV proteins and/or TRPA proteins and/or complexes formed by the insect TRPV proteins and insect TRPA proteins may be used as insecticides or insect repellents.

[0048] Transient receptor potential (TRP) proteins form cation channels, which have been classified into at least seven groups: TRPC (canonical), TRPV (vanilloid), TRPM (melastatin), TRPP (polycystins), TRPML (mucolipins), TRPA (ankyrin), and TRPN (no mechanosensor potential C), which is not found in mammals (Fowler and Montell, 2013).

[0049] All TRP channels exist as tetramers, which can function either as homotertamers or form heterotetramers with other members of the same or different subfamilies. TRP channels can be modulated by a variety of physical and chemical stimuli and are involved in virtually every sensory modality (Fowler and Montell, 2013).

[0050] The TRPV channels are present in a great number of organisms, including, e.g., insects (Drosophila, Tribolium, Pediculus, Culex, and Anopheles), crustaceans (Daphnia pulex) nematodes (Caenorhabditis elegans), molluscs (Aplysia californica, Lottia gigantea) and mammals (humans, mice, rats, monkeys and chimpanzee).

[0051] Currently, the mammalian TRPV family has 6 members: TRPV1, TRPV2, TRPV3, TRPV4, TRPV5 and TRPV6. Mammalian TRPVs are involved in a broad array of sensory functions, including pain perception, temperature, osmolarity, touch, and taste (Venkatachalam and Montell, 2007). In addition to physical stimuli, mammalian TRPVs can be either activated or inhibited by varity of endogenous and exogenous chemical compounds (Vriens et al., 2009).

[0052] Nematodes have 5 members of TRPV family: OCR-1, OCR-2, OCR-3, OCR-4 and OSM-9. Nematode TRPVs are involved in various sensory functions, including osmolarity, olfaction, and mecanosensation (Upadhyay et al., 2016).

[0053] Arthropods, and more particularly insects have two members of TRPV family: Nanchung (Nanchung), and Inactive (Inactive) which are most closely related to nematode OCR-4 and OSM-9 respectfully (Matsuura et al., 2009). Nanchung and Inactive can form tightly associated heteromers. Nanchung and Inactive heteromers are formed exclusively in mechanosensory organs known as chordotonal organs (Nesterov et al., 2015).

[0054] Chordotonal organs are unique to arthropods, are located in insect joints and are activated by stretch resulted from relative rotation of insect body segments (Kavlie and Albert, 2013). Activation of Nanchung and Inactive heteromers by stretch generates nerve signal, which transduces information about gravity, sound, and relative positions of body parts (Gong et al., 2004; Kim et al., 2003; Nesterov et al., 2015).

[0055] At least three commercial insecticides, afidopyropen, pymetrozine and pyrifluquinazon overstimulate and eventually silence Nanchung and Inactive heteromers, perturbing insect coordination and inhibiting feeding, which eventually leads to death by dessication and starvation (Nesterov et al., 2015).

[0056] Afidopyropen, pymetrozine and pyrifluquinazon can directly bind Nanchung protein alone, but binding affinity is greatly increased by formation of Nanchung and Inactive heteromers (Kandasamy et al., 2017). Formation of Nanchung and Inactive heteromers is essential for biological activity and insecticide action, since neither Nanchung nor Inactive alone can be activated by any of the three insecticides (Kandasamy et al., 2017; Nesterov et al., 2015).

[0057] Pymetrozine may also act as insect repellent, although the molecular mechanism of repulsion remains obscure (Chang and Snyder, 2008).

[0058] In addition to the insecticides, both insect Nanchung and Inactive, as well as their nematode orthologs, OCR-4 and OSM-9 can be activated by, nicotinamide, a form of vitamin B3 (Upadhyay et al., 2016). Nicotinamide can be both absorbed from diet and produced engoneously. Analogous to activation of Nanchung and Inactive by the insecticides activation by nicotinamide required co-expression of either insect Nanchung plus Inactive or nematode OCR-4 plus OSM-9.

[0059] Although the effects of either insecticides or nicotinamide requires simultaneous presence of Nanchung and Inactive, it has not ben shown wheter or not aforementioned insecticides and nicotinamide bind to the same or different sites in Nanchung and Inactive heteromers.

[0060] In chordotonal organs Nanchung and Inactive are interdependent: loss of Inactive abolishes expression of Nanchung and vice versa (Gong et al., 2004; Nesterov et al., 2015), suggesting that in chordotonal organs formation of Nanchung and Inactive heteromers is essential for stability of both Nanchung and Inactive proteins. In some other insect tissues, however. Nanchung and Inactive can function independently of each other. In particular, Nanchung, but not Inactive is required to detect food hardness by fruit fly labellar mechanosensory neurons (Jeong et al., 2016). Likewise, Nanchung, but not Inactive is required for defensive kicking behavior in fruit fly wing margin bristles (Li et al., 2016). These observations raise a possibility that in certain tissues Nanchung may partner with some other TRP channel to for protein stability and functional response.

[0061] Commercial insecticide flonicamid (Maienfisch, 2012) as well as its more active derivative, 4-trifluoronicotinamide (TFNA-AM) (Salgado et al., 2014) act on insect chordotonal organs and alter insect feeding behavior in a manner similar to afidopyropen, pymetrozine and purifluquinazon. These compounds, however, do not directly bind or modulate insect TRPV channels and are thought to have different, still unknown molecular target (Kandasamy et al., 2017).

[0062] There is one identified TRPA gene in mammals (Wu et al., 2010) and six TRPA genes in insects (Matsuura et al., 2009). Different members of TRPA family are present in different insect species. Fruit flies have four TRPA channels: TRPA1, Painless, Pyrexia, and Water witch.

[0063] Insect TRPA1 channels are involved in sensation of temperature, mechanical stimulation and light (Fowler and Montell, 2013).

[0064] Insect TRPA1 channels can be activated by several plant-derived insecticides and/or repellents including cinnamaldehyde and allyl isothiocyanate (Kang et al., 2010).

[0065] Cinamaldehyde and allyl isothiocyanate modulate TRPA1 channels by covalently modifying specific cysteine and lysine amino acids in TRPA1 protein (Hinman et al., 2006; Macpherson et al., 2007).

[0066] Painless is involved in sensation of temperature, mechanical stimulation and gravity (Fowler and Montell, 2013).

[0067] Pyrexia is involved in sensation of temperature and gravity (Fowler and Montell, 2013).

[0068] Water witch is involved in distinguishing moist from dry air in fruit flies (Liu et al., 2007), and recovery from tonic immobility in beetles (Kim et al., 2015). In fruit flies Water witch is expressed in hydroreceptors (Liu et al., 2007) and in chordotonal organ of the second segment of antennae (Senthilan et al., 2012). Replacement of the conserved glutamic acid to lysine (E754K) in fruit fly’s Water witch (Cooper et al., 2008), a point mutation, which abolishes ion conductance by other TRP channels (Li et al., 2007) impairs fruit flies sound perception (Senthilan et al., 2012).

[0069] Modulation of fruit fly TRPA-1 channel is thought to be the predominant mode of action of plant-derived repellents cinnamaldehyde and allyl isothiocyanate (Kang et al., 2010).

[0070] Based on amino acid composition Painless, Pyrexia and Water witch were predicted to be not responsive to cinnamaldehyde and allyl isothiocyanate (Kang et al., 2010).

[0071] Cinnamaldehyde and allyl isothiocyanate failed to directly modulate Painless (Sokabe et al., 2008)

[0072] Thus far, there are no reported chemichal modulators of Water witch.

[0073] TRPA channel Water with and TRPV cahnnel Inactive belong to different subfamilies and that Water witch has only 22% identity to Inactive (FIG. 8). Yet, the inventors have discovered that TRPV protein Nanchung forms a complex with TRPA protein Water witch, analogous to previously described complex between TRPV protein Nanchung and TRPV protein Inactive.

[0074] Furthermore, the inventors have discovered that protein complex formed by TRPV protein Nanchung and TRPA protein Water witch can be modulated by commercial insecticides afidopyropen and pymetrozine analogous to the complex formed by TRPV proteins Nanchung and Inactive.

[0075] Even further, the inventors have discovered that protein complex formed by TRPV protein Nanchung and TRPA protein Water witch can be modulated by endogenous agonist nicotinamide analogous to the complex formed by TRPV proteins Nanchung and Inactive.

[0076] Water witch protein has been predicted not to interact with electrophilic plant-derived insecticides and/or repellents cinnamaldehyde and allyl isothiocyanate (Kang et al., 2010). Yet the inventors have discovered that Water witch can be modulated cinnamaldehyde and allyl isothiocyanate.

[0077] Even further the inventors have discovered that formation of complex between TRPV protein Nanchung and TRPA protein Water witch greatly increases binding affinity of the commercial insecticide afidopyropen.

[0078] Even further the inventors have discovered that commercial insecticides afidopyropen and pymetrozine and endogenous agonist nicotinamide bind to the same site in the complex comprising TRPV protein Nanchung and TRPV protein Inactive.

[0079] Even further the inventors have discovered that commercial insecticides afidopyropen and pymetrozine and endogenous agonist nicotinamide bind to the same site in the complex comprising TRPV protein Nanchung and TRPA protein Water witch.

[0080] Furthermore, the inventors have developed methods of identifying additional compounds that bind directly and modulate the complex comprising TRPV protein Nanchung and TRPA protein Water witch.

[0081] Even further, the inventors have developed methods of identifying additional compounds that directly modulate Water witch protein or complexes formed by Nanchung protein and Water witch protein.

[0082] Identification of such compounds may lead to the identification of suitable chemical compounds that can function either as insecticides or insect repellents and be useful in both pest managemen programs, plant protection, crop protection, and public health.

### II. Definitions

[0083] Unless defined otherwise, all technical and scientific terms used herein have the same meaning as commonly understood to one of ordinary skill in the art. Although any methods, devices, and materials similar or equivalent to those described herein can be used in the practice or testing of the presently disclosed subject matter, representative methods, devices, and materials are now described.

[0084] The terms “a,” “an,” and “the” refer to “one or more” when used in this application, including the claims. Thus, for example, reference to “a cell” (e.g., “a mammalian cell”) includes a plurality of such cells (e.g., a plurality of mammalian cells in culture).

[0085] As used herein, the term “about,” when referring to a value or to an amount of mass, weight, time, volume, concentration or percentage is meant to encompass variations of in some embodiments ±20%, in some embodiments ±10%, in some embodiments ±5%, in some embodiments ±1%, in some embodiments ±0.5%, and in some embodiments ±0.1% from the specified amount, as such variations are appropriate to perform the disclosed method.

[0086] The terms “insect,” “insect pest,” or “plant insect pest” refer to any one of the numerous usually small arthropod animals of the class Insecta that are known to associate with plants and which, as a result of that association, causes a detrimental effect on the plant’s health and vigor. The term plant as used herein encompasses whole plants and parts of plants such as roots, stems, leaves and seed, as well as cells and tissues within the plants or plant parts. The terms “insect,” “insect pest,” or “plant insect pest” are used interchangeably throughout the instant application.

[0087] The terms “pests” and/or “pest species” refer to any one of numerous usually small arthropod animals of the class Insecta that are known to associate with plants and which, as a result of that association, causes a detrimental effect on the plant’s health and vigor. Additionally, the terms refer to include mollusk, nematodes, other arthropod classes that are known to associate with plants and which, as a result of that association, causes a detrimental effect on the plant’s health and vigor. The terms further includes arthropods, gastropods and nematodes including but not limited to: insects from the order of Lepidoptera, for example Achroia grisella, Acleris spp. such as A. fimbriana, A. gloverana, A. variana; Acrolepiopsis assectella, Acronicta major, Adoxophyes spp. such as A. cyrtosema, A. orana; Aedia leucomelas, Agrotis spp. such as A. exclamationis, A. fucosa, A. ipsilon, A. orthogoma, A. segetum, A. subterranea; Alabama argillacea, Aleurodicus dispersus, Alsophila pometaria, Ampelophaga rubiginosa, Amyelois transitella, Anacampsis sarcitella, Anagasta kuehniella, Anarsia lineatella, Anisota senatoria, Antheraea pernyi, Anticarsia (=Thermesia) spp. such as A. gemmatalis; Apamea spp, Aproaerema modicella, Archips spp. such as A. argyrospila, A. fuscocupreanus, A. rosana, A. xyloseanus; Argyresthia conjugella, Argyroploce spp., Argyrotaenia spp. such as A. velutiNanchunga; Athetis mindara, Austroasca viridigrisea, Autographa gamma, Autographa nigrisigna, Barathra brassicae, Bedellia spp., Bonagota salubricola, Borbo cinnara, Bucculatrix thurberiella, Bupalus piniarius, Busseola spp., Cacoecia spp. such as C. muriNanchunga, C. podana; Cactoblastis cactorum, Cadra cautella, Calingo braziliensis, Caloptilis theivora, Capua reticulana, Carposina spp. such as C. niponensis, C. sasakii; Cephus spp, Chaetocnema aridula, Cheimatobia brumata, Chilo spp. such as C. Indicus, C. suppressalis, C. partellus; Choreutis pariana, Choristoneura spp. such as C. conflictana, C. fumiferana, C. longicellana, C. muriNanchunga, C. occidentalis, C. rosaceana; Chrysodeixis (=Pseudoplusia) spp. such as C. eriosoma, C. includens; Cirphis unipuncta, Clysia ambiguella, Cnaphalocerus spp., Cnaphalocrocis medinalis, Cnephasia spp., Cochylis hospes, Coleophora spp., Colias eurytheme, Conopomorpha spp., Conotrachelus spp., Copitarsia spp., Corcyra cephalonica, Crambus caliginosellus, Crambus teterrellus, Crocidosema (=Epinotia) aporema, Cydalima (=Diaphania) perspectalis, Cydia (=Carpocapsa) spp. such as C. pomonella, C. latiferreana; Dalaca noctuides, Datana integerrima, Dasychira pinicola, Dendrolimus spp. such as D. pini, D. spectabilis, D. sibiricus; Desmia funeralis, Diaphania spp. such as D. nitidalis, D. hyalinata; Diatraea grandiosella, Diatraea saccharalis, Diphthera festiva, Earias spp. such as E. insulana, E. vittella; Ecdytolopha aurantianu, Egira (=Xylomyges) curialis, Elasmopalpus lignosellus, Eldana saccharina, Endopiza viteana, Ennomos subsignaria, Eoreuma loftini, Ephestia spp. such as E. cautella, E. elutella, E. kuehniella; Epinotia aporema, Epiphyas postvittana, Erannis tiliaria, Erionota thrax, Etiella spp., Eulia spp., Eupoecilia ambiguella, Euproctis chrysorrhoea, Euxoa spp., Evetria bouliana, Faronta albilinea, Feltia spp. such as F. subterranean; Galleria mellonella, Gracillaria spp., Grapholita spp. such as G. funebrana, G. molesta, G. inopinata; Halysidota spp., Harrisina americana, Hedylepta spp., Helicoverpa spp. such as H. armigera (=Heliothis armigera), H. zea (=Heliothis zea); Heliothis spp. such as H. assulta, H. subflexa, H. virescens; Hellula spp. such as H. undalis, H. rogatalis; Helocoverpa gelotopoeon, Hemileuca oliviae, Herpetogramma licarsisalis, Hibernia defoliaria, Hofmannophila pseudospretella, Homoeosoma electellum, Homona magNanchungima, Hypena scabra, Hyphantria cunea, Hyponomeuta padella, Hyponomeuta malinellus, Kakivoriaflavofasciata, Keiferia lycopersicella, Lambdina fiscellaria fiscellaria, Lambdina fiscellaria lugubrosa, Lamprosema indicata, Laspeyresia molesta, Leguminivora glycinivorella, Lerodea eufala, Leucinodes orbonalis, Leucoma salicis, Leucoptera spp. such as L. coffeella, L. scitella; Leuminivora lycinivorella, Lithocolletis blancardella, Lithophane antennata, Llattia octo (=Amyna axis), Lobesia botrana, Lophocampa spp., Loxagrotis albicosta, Loxostege spp. such as L. sticticalis, L. cereralis; Lymantria spp. such as L. dispar, L. monacha; Lyonetia clerkella, Lyonetia prunifoliella, Malacosoma spp. such as M. americanum, M. californicum, M. constrictum, M. neustria; Mamestra spp. such as M. brassicae, M. configurata; Mamstra brassicae, Manduca spp. such as M. quinquemaculata, M. sexta; Marasmia spp, Marmara spp., Maruca testulalis, Megalopyge lanata, Melanchra picta, Melanitis leda, Mocis spp. such as M. lapites, M. repanda; Mocis latipes, Monochroa fragariae, Mythimna separata, Nemapogon cloacella, Neoleucinodes elegantalis, Nepytia spp., Nymphula spp., Oiketicus spp., Omiodes indicata, Omphisa anastomosalis, Operophtera brumata, Orgyia pseudotsugata, Oria spp., Orthaga thyrisalis, Ostrinia spp. such as O. nubilalis; Oulema oryzae, Paleacrita vernata, Panolis flammea, Parnara spp., Papaipema nebris, Papilio cresphontes, Paramyelois transitella, Paranthrene regalis, Paysandisia archon, Pectinophora spp. such as P. gossypiella; Peridroma saucia, Perileucoptera spp., such as P. coffeella; Phalera bucephala, Phryganidia californica, Phthorimaea spp. such as P. operculella; Phyllocnistis citrella, Phyllonorycter spp. such as P. blancardella, P. crataegella, P. issikii, P. ringoniella; Pieris spp. such as P. brassicae, P. rapae, P. napi; Pilocrocis tripunctata, Plathypena scabra, Platynota spp. such as P. flavedana, P. idaeusalis, P. stultana; Platyptilia carduidactyla, Plebejus argus, Plodia interpunctella, Plusia spp, Plutella maculipennis, Plutella xylostella, Pontia protodica, Prays spp., Prodenia spp., Proxenus lepigone, Pseudaletia spp. such as P. sequax, P. unipuncta; Pyrausta nubilalis, Rachiplusia nu, Richia albicosta, Rhizobius ventralis, Rhyacionia frustrana, Sabulodes aegrotata, Schizura concinna, Schoenobius spp., Schreckensteinia festaliella, Scirpophaga spp. such as S. incertulas, S. innotata; Scotia segetum, Sesamia spp. such as S. inferens, Seudyra subflava, Sitotroga cerealella, Sparganothis pilleriana, Spilonota lechriaspis, S. ocellana, Spodoptera (=Lamphygma) spp. such as S. eridania, S. exigua, S. frugiperda, S. latisfascia, S. littoralis, S. litura, S. omithogalli; Stigmella spp., Stomopteryx subsecivella, Strymon bazochii, Sylepta derogata, SyNanchungthedon spp. such as S. exitiosa, Tecia solanivora, Telehin licus. Thaumatopoea pityocampa, Thaumatotibia (=Cryptophlebia) leucotreta, Thaumetopoea pityocampa, Thecla spp., Theresimima ampelophaga, Thyrinteina spp, Tildenia inconspicuella, Tinea spp. such as T. cloacella, T. pellionella; Tineola bisselliella, Tortrix spp. such as T. viridana; Trichophaga tapetzella, Trichoplusia spp. such as T. ni; Tuta (=Scrobipalpula) absoluta, Udea spp. such as U. rubigalis, U. rubigalis; Virachola spp, Yponomeuta padella, and Zeiraphera canadensis;insects from the order of Coleoptera, for example Acalymma vittatum, Acanthoscehdes obtectus, Adoretus spp., Agelastica alni, Agrilus spp. such as A. anxius, A. planipennis, A. sinuatus; Agriotes spp. such as A. fuscicollis, A. lineatus, A. obscurus; Alphitobius diaperinus, Amphimallus solstitialis, Anisandrus dispar, Anisoplia austriaca, Anobium punctatum, Anomala corpulenta, Anomala rufocuprea, Anoplophora spp. such as A. glabripennis; Anthonomus spp. such as A. eugenii, A. grandis, A. pomorum; Anthrenus spp., Aphthona euphoridae, Apion spp., Apogonia spp., Athous haemorrhoidalis, Atomaria spp. such as A. linearis; Attagenus spp., Aulacophorafemoralis, Blastophagus piniperda, Blitophaga undata, Bruchidius obtectus, Bruchus spp. such as B. lentis, B. pisorum, B. rufimanus; Byctiscus betulae, Callidiellum rufipenne, Callopistria floridensis, Callosobruchus chinensis, Cameraria ohridella, Cassida nebulosa, Cerotoma trifurcata, Cetonia aurata, Ceuthorhynchus spp. such as C. assimilis, C. napi; Chaetocnema tibialis, Cleonus mendicus, Conoderus spp. such as C. vespertinus; Conotrachelus nenuphar, Cosmopolites spp., Costelytra zealandica, Crioceris asparagi, Cryptolestes ferrugineus, Cryptorhynchus lapathi, Ctenicera spp. such as C. destructor; Curculio spp., Cylindrocopturus spp., Cyclocephala spp, Dactylispa balyi, Dectes texanus, Dermestes spp., Diabrotica spp. such as D. undecimpunctata, D. speciosa, D. longicornis, D. semipunctata, D. virgifera; Diaprepes abbreviates, Dichocrocis spp., Dicladispa armigera, Diloboderus abderus, Diocalandra frumenti (Diocalandra stigmaticollis), Enaphalodes rufulus, Epilachna spp. such as E. varivestis, E. vigintioctomaculata; Epitrix spp. such as E. hirtipennis, E. similaris; Eutheola humilis, Eutinobothrus brasiliensis, Faustinus cubae, Gibbium psylloides, Gnathocerus cornutus, Hellula undalis, Heteronychus arator, Hylamorpha elegans, Hylobius abietis, Hylotrupes bajulus, Hypera spp. such as H. brunneipennis, H. postica; Hypomeces squamosus, Hypothenemus spp., Ips typographus, Lachnosterna consanguinea, Lasioderma serricorne, Latheticus oryzae, Lathridius spp., Lema spp. such as L. bilineata, L. melanopus; Leptinotarsa spp. such as L. decemlineata; Leptispa pygmaea, Limonius californicus, Lissorhoptrus oryzophilus, Lixus spp., Luperodes spp., Lyctus spp. such as L. bruneus; Liogenys fuscus, Macrodactylus spp. such as M. subspinosus; Maladera matrida, Megaplatypus mutates, Megascelis spp., Melanotus communis, Meligethes spp. such as M. aeneus; Melolontha spp. such as M. hippocastani, M. melolontha; Metamasius hemipterus, Microtheca spp, Migdolus spp. such as M. fryanus, Monochamus spp. such as M. alternatus; Naupactus xanthographus, Niptus hololeucus, Oberia brevis, Oemona hirta, Oryctes rhinoceros, Oryzaephilus surinamensis, Oryzaphagus oryzae, Otiorrhynchus sulcatus, Otiorrhynchus ovatus, Otiorrhynchus sulcatus, Oulema melanopus, Oulema oryzae, Oxycetonia jucunda, Phaedon spp. such as P. brassicae, P. cochleariae; Phoracantha recurva, Phyllobius pyri, Phyllopertha horticola, Phyllophaga spp. such as P. helleri; Phyllotreta spp. such as P. chrysocephala, P. nemorum, P. striolata, P. vittula; Phyllopertha horticola, Popillia japonica, Premnotrypes spp., Psacothea hilaris, Psylliodes chrysocephala, Prostephanus truncates, Psylliodes spp., Ptinus spp., Pulga saltona, Rhizopertha dominica, Rhynchophorus spp. such as R. billineatus, R. ferrugineus, R. palmarum, R. phoenicis, R. vulneratus; Saperda candida, Scolytus schevyrewi, Scyphophorus acupunctatus, Sitona lineatus, Sitophilus spp. such as S. granaria, S. oryzae, S. zeamais; Sphenophorus spp. such as S. levis; Stegobium paniceum, Sternechus spp. such as S. subsignatus; Strophomorphus ctenotus, Symphyletes spp., Tanymecus spp., Tenebrio molitor, Tenebrioides mauretanicus, Tribolium spp. such as T. castaneum; Trogoderma spp., Tychius spp., Xylotrechus spp. such as X. pyrrhoderus; and, Zabrus spp. such as Z. tenebrioides; insects from the order of Diptera for example Aedes spp. such as A. aegypti, A. albopictus, A. vexans; Anastrepha ludens, Anopheles spp. such as A. albimanus, A. crucians, A. freeborni, A. gambiae, A. leucosphyrus, A. maculipennis, A. minimus, A. quadrimaculatus, A. sinensis; Bactrocera invadens, Bibio hortulanus, Calliphora erythrocephala, Calliphora vicina, Ceratitis capitata, Chrysomyia spp. such as C. bezziana, C. hominivorax, C. macellaria; Chrysops atlanticus, Chrysops discalis, Chrysops silacea, Cochliomyia spp. such as C. hominivorax; Contarinia spp. such as C. sorghicola; Cordylobia anthropophaga, Culex spp. such as C. nigripalpus, C. pipiens, C. quinquefasciatus, C. tarsalis, C. tritaeniorhynchus; Culicoides furens, Culiseta inornata, Culiseta melanura, Cuterebra spp., Dacus cucurbitae, Dacus oleae, Dasineura brassicae, Dasineura oxycoccana, Delia spp. such as D. antique, D. coarctata, D. platura, D. radicum; Dermatobia hominis, Drosophila spp. such as D. suzukii, Fannia spp. such as F. canicularis; Gastraphilus spp. such as G. intestinalis; Geomyza tipunctata, Glossina spp. such as G. fuscipes, G. morsitans, G. palpalis, G. tachinoides; Haematobia irritans, Haplodiplosis equestris, Hippelates spp., Hylemyia spp. such as H. platura; Hypoderma spp. such as H. lineata; Hyppobosca spp., Hydrellia philippina, Leptoconops torrens, Liriomyza spp. such as L. sativae, L. trifolii; Lucilia spp. such as L. caprina, L. cuprina, L. sericata; Lycoria pectoralis, Mansonia titillanus, Mayetiola spp. such as M. destructor; Musca spp. such as M. autumnalis, M. domestica; Muscina stabulans, Oestrus spp. such as O. ovis; Opomyza florum, Oscinella spp. such as O. frit; Orseolia oryzae, Pegomya hysocyami, Phlebotomus argentipes, Phorbia spp. such as P. antiqua, P. brassicae, P. coarctata; Phytomyza gymnostoma, Prosimulium mixtum, Psila rosae, Psorophora columbiae, Psorophora discolor, Rhagoletis spp. such as R. cerasi, R. cingulate, R. indifferens, R. mendax, R. pomonella; Rivellia quadrifasciata, Sarcophaga spp. such as S. haemorrhoidalis; Simulium vittatum, Sitodiplosis mosellana, Stomoxys spp. such as S. calcitrans; Tabanus spp. such as T. atratus, T. bovinus, T. lineola, T. similis; Tannia spp., Thecodiplosis japonensis, Tipula oleracea, Tipula paludosa, and Wohlfahrtia spp.; insects from the order of Thysanoptera for example, Baliothrips biformis, Dichromothrips corbetti, Dichromothrips ssp., Echinothrips americanus, Enneothrips flavens, Frankliniella spp. such as F. fusca, F. occidentalis, F. tritici; Heliothrips spp., Hercinothrips femoralis, Kakothrips spp., Microcephalothrips abdominalis, Neohydatothrips samayunkur, Pezothrips kellyanus, Rhipiphorothrips cruentatus, Scirtothrips spp. such as S. citri, S. dorsalis, S. perseae; Stenchaetothrips spp, Taeniothrips cardamoni, Taeniothrips inconsequens, Thrips spp. such as T. imagines, T. hawaiiensis, T. oryzae, T. palmi, T. parvispinus, T. tabaci; insects from the order of Hemiptera for example, Acizzia jamatonica, Acrosternum spp. such as A. hilare; Acyrthosipon spp. such as A. onobrychis, A. pisum; Adelges laricis, Adelges tsugae, Adelphocoris spp., such as A. rapidus, A. superbus; Aeneolamia spp., Agonoscena spp., Aulacorthum solani, Aleurocanthus woglumi, Aleurodes spp., Aleurodicus disperses, Aleurolobus barodensis, Aleurothrixus spp., Amrasca spp., Anasa tristis, Antestiopsis spp., Anuraphis cardui, Aonidiella spp., Aphanostigma piri, Aphidula nasturtii, Aphis spp. such as A. craccivora, A. fabae, A. forbesi, A. gossypii, A. grossulariae, A. maidiradicis, A. pomi, A. sambuci, A. schneideri, A. spiraecola; Arboridia apicalis, Arilus critatus, Aspidiella spp., Aspidiotus spp., Atanus spp., Aulacaspis yasumatsui, Aulacorthum solani, Bactericera cockerelli (Paratrioza cockerelli), Bemisia spp. such as B. argentifolii, B. tabaci (Aleurodes tabaci); Blissus spp. such as B. leucopterus; Brachycaudus spp. such as B. cardui, B. helichrysi, B. persicae, B. prunicola; Brachycolus spp., Brachycorynella asparagi, Brevicoryne brassicae, Cacopsylla spp. such as C. fulguralis, C. pyricola (Psylla piri); Calligypona marginata, Calocoris spp., Campylomma livida, Capitophorus horni, Carneocephala fulgida, Cavelerius spp., Ceraplastes spp., Ceratovacuna lanigera, Ceroplastes ceriferus, Cerosipha gossypii, Chaetosiphon fragaefolii, Chionaspis tegalensis, Chlorita onukii, Chromaphis juglandicola, Chrysomphalus ficus, Cicadulina mbila, Cimex spp. such as C. hemipterus, C. lectularius; Coccomytilus halli, Coccus spp. such as C. hesperidum, C. pseudomagnoliarum; Corythucha arcuata, Creontiades dilutus, Cryptomyzus ribis, Chrysomphalus aonidum, Cryptomyzus ribis, Ctenarytaina spatulata, Cyrtopeltis notatus, Dalbulus spp., Dasynus piperis, Dialeurodes spp. such as D. citrifolii; Dalbulus maidis, Diaphorina spp. such as D. citri; Diaspis spp. such as D. bromeliae; Dichelops furcatus, Diconocoris hewetti, Doralis spp., Dreyfusia nordmannianae, Dreyfusia piceae, Drosicha spp., Dysaphis spp. such as D. plantaginea, D. pyri, D. radicola; Dysaulacorthum pseudosolani, Dysdercus spp. such as D. cingulatus, D. intermedius; Dysmicoccus spp., Edessa spp, Geocoris spp, Empoasca spp. such as E. fabae, E. solana; Epidiaspis leperii, Eriosoma spp. such as E. lanigerum, E. pyricola; Erythroneura spp., Eurygaster spp. such as E. integriceps; Euscelis bilobatus, Euschistus spp. such as E. heros, E. impictiventris, E. servus; Fiorinia theae, Geococcus coffeae, Glycaspis brimblecombei, Halyomorpha spp. such as H. halys; Heliopeltis spp., Homalodisca vitripennis (=H. coagulata), Horcias nobilellus, Hyalopterus pruni, Hyperomyzus lactucae, Icerya spp. such as I. purchase; Idiocerus spp., Idioscopus spp., Laodelphax striatellus, Lecanium spp., Lecanoideus floccissimus, Lepidosaphes spp. such as L. ulmi; Leptocorisa spp., Leptoglossus phyllopus, Lipaphis erysimi, Lygus spp. such as L. hesperus, L. lineolaris, L. pratensis; Maconellicoccus hirsutus, Marchalina hellenica, Macropes excavatus, Macrosiphum spp. such as M. rosae, M. avenae, M. euphorbiae; Macrosteles quadrilineatus, Mahanarva fimbriolata, Megacopta cribraria, Megoura viciae, Melanaphis pyrarius, Melanaphis sacchari, Melanocallis (=Tinocallis) caryaefoliae, Metcafiella spp., Metopolophium dirhodum, Monellia costalis, Monelliopsis pecanis, Myzocallis coryli, Murgantia spp, Myzus spp. such as M. ascalonicus, M. cerasi, M. nicotianae, M. persicae, M. varians; Nasonovia ribis-nigri, Neotoxoptera formosana, Neomegalotomus spp, Nephotettix spp. such as N. malayanus, N. nigropictus, N. parvus, N. virescens; Nezara spp. such as N. viridula; Nilaparvata lugens, Nysius huttoni, Oebalus spp. such as O. pugnax; Oncometopia spp., Orthezia praelonga, Oxycaraenus hyalinipennis, Parabemisia myricae, Parlatoria spp., Parthenolecanium spp. such as P. corni, P. persicae; Pemphigus spp. such as P. bursarius, P. populivenae; Peregrinus maidis, Perkinsiella saccharicida, Phenacoccus spp. such as P. aceris, P. gossypii; Phloeomyzus passerinii, Phorodon humuli, Phylloxera spp. such as P. devastatrix, Piesma quadrata, Piezodorus spp. such as P. guildinii; Pinnaspis aspidistrae, Planococcus spp. such as P. citri, P. ficus; Prosapia bicincta, Protopulvinaria pyriformis, Psallus seriatus, Pseudacysta persea, Pseudaulacaspis pentagona, Pseudococcus spp. such as P. comstocki; Psylla spp. such as P. mali; Pteromalus spp., Pulvinaria amygdali, Pyrilla spp., Quadraspidiotus spp., such as Q. perniciosus; Quesada gigas, Rastrococcus spp., Reduvius senilis, Rhizoecus americanus, Rhodnius spp., Rhopalomyzus ascalonicus, Rhopalosiphum spp. such as R. pseudobrassicas, R. insertum, R. maidis, R. padi; Sagatodes spp., Sahlbergella singularis, Saissetia spp., Sappaphis mala, Sappaphis mali, Scaptocoris spp, Scaphoides titanus, Schizaphis graminum, Schizoneura lanuginosa, Scotinophora spp., Selenaspidus articulatus, Sitobion avenae, Sogata spp., Sogatella furcifera, Solubea insularis, Spissistilus festinus (=Stictocephala festina); Stephanitis nashi, Stephanitis pyrioides, Stephanitis takeyai, Tenalaphara malayensis, Tetraleurodes perseae, Therioaphis maculate, Thyanta spp. such as T. accerra, T. perditor; Tibraca spp., Tomaspis spp., Toxoptera spp. such as T. aurantii; Trialeurodes spp. such as T. abutilonea, T. ricini, T. vaporariorum; Triatoma spp., Trioza spp., Typhlocyba spp., Unaspis spp. such as U. citri, U. yanonensis; and Viteus vitifolii; insects from the order Hymenoptera for example Acanthomyops interjectus, Athalia rosae, Atta spp. such as A. capiguara, A. cephalotes, A. cephalotes, A. laevigata, A. robusta, A. sexdens, A. texana, Bombus spp., Brachymyrmex spp., Camponotus spp such as C. floridanus, C. pennsylvanicus, C. modoc; Cardiocondyla nuda, Chalibion sp, Crematogaster spp., Dasymutilla occidentalis, Diprion spp., Dolichovespula maculata, Dorymyrmex spp, Dryocosmus kuriphilus, Formica spp, Hoplocampa spp. such as H. minuta, H. testudinea; Iridomyrmex humilis, Lasius spp. such as L. niger, Linepithema humile, Liometopum spp, Leptocybe invasa, Monomorium spp such as M. pharaonis, Monomorium, Nylandria fulva, Pachycondyla chinensis, Paratrechina longicornis, Paravespula spp such as P. germanica, P. pennsylvanica, P. vulgaris; Pheidole spp such as P. megacephala; Pogonomyrmex spp such as P. barbatus, P. californicus, Polistes rubiginosa, Prenolepis impairs, Pseudomyrmex gracilis, Schelipron spp, Sirex cyaneus, Solenopsis spp such as S. geminata, S.invicta, S. molesta, S. richteri, S. xyloni, Sphecius speciosus, Sphex spp, Tapinoma spp such as T. melanocephalum, T. sessile; Tetramorium spp such as T. caespitum, T. bicarinatum, Vespa spp. such as V. crabro; Vespula spp such as V. squamosal; Wasmannia auropunctata, Xylocopa sp.; insects from the order Orthoptera for example Acheta domesticus, Calliptamus italicus, Chortoicetes terminifera, Ceuthophilus spp, Diastrammena asynamora, Dociostaurus maroccanus, Gryllotalpa spp such as G. africana, G. gryllotalpa; Gryllus spp, Hieroglyphus daganensis, Kraussaria angulifera, Locusta spp. such as L. migratoria, L. pardalina; Melanoplus spp such as M. bivittatus, M. femurrubrum, M. mexicanus, M. sanguinipes, M. spretus; Nomadacris septemfasciata, Oedaleus senegalensis, Scapteriscus spp, Schistocerca spp such as S. americana, S. gregaria, Stemopelmatus spp, Tachycines asynamorus, and Zonozerus variegatus; pests from the Class Arachnida for example Acari, e.g. of the families Argasidae, Ixodidae and Sarcoptidae, such as Amblyomma spp. (e.g. A. americanum, A. variegatum, A. maculatum), Argas spp. such as A. persicu), Boophilus spp. such as B. annulatus, B. decoloratus, B. microplus, Dermacentor spp such as D.silvarum, D. andersoni, D. variabilis, Hyalomma spp. such as H. truncatum, Ixodes spp. such as I. ricinus, I. rubicundus, I. scapularis, I. holocyclus, I. pacificus, Rhipicephalus sanguineus, Ornithodorus spp. such as O. moubata, O. hermsi, O. turicata), Ornithonyssus bacoti, Otobius megnini, Dermanyssus gallinae, Psoroptes spp such as P. ovis, Rhipicephalus spp such as R. sanguineus, R. appendiculatus, Rhipicephalus evertsi), Rhizoglyphus spp; Sarcoptes spp. such asS. Scabiei; and Family Eriophyidae including Aceria spp such as A. sheldoni, A. anthocoptes, Acallitus spp; Aculops spp. such as A. lycopersici, A. pelekassi; Aculus spp such as A. schlechtendali; Colomerus vitis, Epitrimerus pyri, Phyllocoptruta oleivora; Eriophytes ribis and Eriophyes spp such as Eriophyes sheldoni; Family Tarsonemidae including Hemitarsonemus spp., Phytonemus pallidus and Polyphagotarsonemus latus, Stenotarsonemus spp. Steneotarsonemus spinki; Family Tenuipalpidae including Brevipalpus spp. such as B. phoenicis; Family Tetranychidae including Eotetranychus spp., Eutetranychus spp., Oligonychus spp., Petrobia latens, Tetranychus spp such as T. cinnabarinus, T. evansi, T. kanzawai, T, pacificus, T. phaseulus, T. telarius and T. urticae; Bryobia praetiosa; Panonychus spp. such as P. ulmi, P. citri;, Metatetranychus spp. and Oligonychus spp. such as O. pratensis, O. perseae), Vasates lycopersici; Raoiella indica, Family Carpoglyphidae including Carpoglyphus spp; Penthaleidae spp such as Halotydeus destructor; Family Demodicidae with species such a Demodex spp; Family Trombicidea including Trombicula spp:; Family Macronyssidae including Ornothonyssus spp; Family Pyemotidae including Pyemotes tritici; Tyrophagus putrescentiae; Family Acaridae including Acarus siro; Family Araneida including Latrodectus mactans, Tegenaria agrestis, Chiracanthium sp, Lycosa sp Achaearanea tepidariorum and Loxosceles reclusa; pests from the Phylum Nematoda, for example, plant parasitic nematodes such as root-knot nematodes, Meloidogyne spp. such as M. hapla, M. incognita, M. javanica; cyst-forming nematodes, Globodera spp. such as G. rostochiensis; Heterodera spp. such as H. avenae, H. glycines, H. schachtii, H. trifolii; Seed gall nematodes, Anguina spp.; Stem and foliar nematodes, Aphelenchoides spp. such as A. besseyi; Sting nematodes, Belonolaimus spp. such as B. longicaudatus; Pine nematodes, Bursaphelenchus spp. such as B. lignicolus, B. xylophilus; Ring nematodes, Criconema spp.; Criconemella spp. such as C. xenoplax and C. ornata; and, Criconemoides spp. such as Criconemoides informis; Mesocriconema spp.; Stem and bulb nematodes, Ditylenchus spp. such as D. destructor, D. dipsaci; Awl nematodes, Dolichodorus spp.; Spiral nematodes, Heliocotylenchus multicinctus; Sheath and sheathoid nematodes, Hemicycliophora spp. and Hemicriconemoides spp.; Hirshmanniella spp.; Lance nematodes, Hoploaimus spp.; False rootknot nematodes, Nacobbus spp.; Needle nematodes, Longidorus spp. such as L. elongatus; Lesion nematodes, Pratylenchus spp. such as P. brachyurus, P. neglectus, P. penetrans, P. curvitatus, P. goodeyi; Burrowing nematodes, Radopholus spp. such as R. similis; Rhadopholus spp.; Rhodopholus spp.; Reniform nematodes, Rotylenchus spp. such as R. robustus, R. reniformis; Scutellonema spp.; Stubby-root nematode, Trichodorus spp. such as T. obtusus, T. primitivus; Paratrichodorus spp. such as P. minor; Stunt nematodes, Tylenchorhynchus spp. such as T. claytoni, T. dubius; Citrus nematodes, Tylenchulus spp. such as T. semipenetrans; Dagger nematodes, Xiphinema spp.; and other plant parasitic nematode species; insects from the order Isoptera for example Calotermesflavicollis, Coptotermes spp such as C. formosanus, C. gestroi, C. acinaciformis; Cornitermes cumulans, Cryptotermes spp such as C. brevis, C. cavifrons; Globitermes sulfureus, Heterotermes spp such as H. aureus, H. longiceps, H. tenuis; Leucotermes flavipes, Odontotermes spp., Incisitermes spp such as I. minor, I. Snyder; Marginitermes hubbardi, Mastotermes spp such as M. darwiniensis Neocapritermes spp such as N. opacus, N. parvus; Neotermes spp, Procornitermes spp, Zootermopsis spp such as Z. angusticollis, Z. nevadensis, Reticulitermes spp. such as R. hesperus, R. tibialis, R. speratus, R. flavipes, R. grassei, R. lucifugus, R. santonensis, R. virginicus; Termes natalensis; insects from the order Blattaria for example Blatta spp such as B. orientalis, B. lateralis; Blattella spp such as B. asahinae, B. germanica; Leucophaea maderae, Panchlora nivea, Periplaneta spp such as P. americana, P. australasiae, P. brunnea, P. fuligginosa, P. japonica; Supella longipalpa, Parcoblatta pennsylvanica, Eurycotis floridana, Pycnoscelus surinamensis; insects from the order Siphonoptera for example Cediopsylla simples, Ceratophyllus spp., Ctenocephalides spp such as C. felis, C. canis, Xenopsylla cheopis, Pulex irritans, Trichodectes canis, Tunga penetrans, and Nosopsyllus fasciatus; insects from the order Thysanura for example Lepisma saccharina, Ctenolepisma urbana, and Thermobia domestica; pests from the class Chilopoda for example Geophilus spp., Scutigera spp. such as Scutigera coleoptrata; pests from the class Diplopoda for example Blaniulus guttulatus, Julus spp, Narceus spp.; pests from the class Symphyla for example Scutigerella immaculata; insects from the order Dermaptera, for example Forficula auricularia; insects from the order Collembola, for example Onychiurus spp. such as Onychiurus armatus; pests from the order Isopoda for example, Armadillidium vulgare, Oniscus asellus, Porcellio scaber; insects from the order Phthiraptera, for example Damalinia spp., Pediculus spp. such as Pediculus humanus capitis, Pediculus humanus corporis, Pediculus humanus humanus; Pthirus pubis, Haematopinus spp. such as Haematopinus eurysternus, Haematopinus suis; Linognathus spp. such as Linognathus vituli; Bovicola bovis, Menopon gallinae, Menacanthus stramineus and Solenopotes capillatus, Trichodectes spp.. Examples of further pest species which may be controlled by the compounds and/or compositions identified herein include: from the Phylum Mollusca, class Bivalvia, for example, Dreissena spp.; class Gastropoda, for example, Arion spp., Biomphalaria spp., Bulinus spp., Deroceras spp., Galba spp., Lymnaea spp., Oncomelania spp., Pomacea canaliclata, Succinea spp.; from the class of the helminths, for example, Ancylostoma duodenale, Ancylostoma ceylanicum, Acylostoma braziliensis, Ancylostoma spp., Ascaris lubricoides, Ascaris spp., Brugia malayi, Brugia timori, Bunostomum spp., Chabertia spp., Clonorchis spp., Cooperia spp., Dicrocoelium spp., Dictyocaulusfilaria, Diphyllobothrium latum, Dracunculus medinensis, Echinococcus granulosus, Echinococcus multilocularis, Enterobius vermicularis, Faciola spp., Haemonchus spp. such as Haemonchus contortus; Heterakis spp., Hymenolepis Nanchunga, Hyostrongulus spp., Loa Loa, Nematodirus spp., Oesophagostomum spp., Opisthorchis spp., Onchocerca volvulus, Ostertagia spp., Paragonimus spp., Schistosomen spp., Strongyloides fuelleborni, Strongyloides stercora lis, Stronyloides spp., Taenia saginata, Taenia solium, Trichinella spiralis, Trichinella nativa, Trichinella britovi, Trichinella nelsoni, Trichinella pseudopsiralis, Trichostrongulus spp., Trichuris trichuria, Wuchereria bancrofti.

[0088] The terms “non-pest” and/or “non-target” species refers to all other animals that would not be classified as “pests” and/or “pest species” as defined above.

[0089] The term “nucleic acid” refers to deoxyribonucleotides or ribonucleotides and polymers thereof in either single- or double-stranded form, composed of monomers (nucleotides) containing a sugar, phosphate and a base that is either a purine or pyrimidine. Unless specifically limited, the term encompasses nucleic acids containing known analogs of natural nucleotides, conservatively modified variants thereof, complementary sequences, and degenerate codon substitutions that have similar binding properties as the reference nucleic acid and are metabolized in a manner similar to naturally occurring nucleotides.

[0090] The terms “nucleic acid” or “nucleic acid molecule” can also be used interchangeably with gene, open reading frame (ORF), cDNA, and mRNA encoded by a gene, nucleic acid molecule, nucleic acid fragment, nucleic acid segment, or polynucleotide.

[0091] The term “gene” is used broadly to refer to any segment of nucleic acid associated with a biological function. Thus, genes include coding sequences, and/or the regulatory sequences required for their expression. For example, “gene” refers to a nucleic acid fragment that expresses mRNA, functional RNA, or specific protein, including regulatory sequences. “Genes” also include non-expressed DNA segments that, for example, form recognition sequences for other proteins. “Genes” can be obtained from a variety of sources, including cloning from a source of interest or synthesizing from known or predicted sequence information, and may include sequences designed to have desired parameters.

[0092] The term “gene delivery” or “gene transfer” refers to methods or systems for reliably introducing foreign DNA into target cells and include injection, transduction, transfection, transformation and electroporation. Such methods can result in transient or long-term expression of genes.

[0093] The term “transduction” refers to the delivery of a DNA molecule to a recipient cell either in vivo or in vitro, via a replication-defective viral vector, such as, e.g., adenoviral vector.

[0094] The term “transfection” is used to refer to the uptake of foreign DNA by a mammalian cell. A cell has been “transfected” when exogenous DNA has been introduced across the cell plasma membrane. Transfection can be used to introduce one or more exogenous DNA moieties, such as a plasmid vector and other nucleic acid molecules, into suitable cells. The term refers to both stable and transient uptake of the genetic material.

[0095] The term “transformation” and/or “transfection” refers to a process for introducing heterologous DNA into a cell. Transformed cells are understood to encompass not only the end product of a transformation/transfection process, but also transgenic progeny thereof.

[0096] The term “injection” refers to a process for introducing heterologous DNA or RNA into a cell using a syringe and a needle.

[0097] The term “vector” refers to any genetic element, such as a plasmid, phage, transposon, cosmid, chromosome, virus, virion, etc., which is capable of replication when associated with the proper control elements, such as a helper virus, and which can transfer gene sequences between cells. Thus, the term includes cloning and expression vehicles, as well as replication-defective viral vectors.

[0098] The terms “expression vector” and “expression cassette” refer to a nucleic acid molecule capable of directing expression of a particular nucleotide sequence in an appropriate host cell, typically comprising a promoter operatively linked to the nucleotide sequence of interest which is operatively linked to termination signals. It also typically comprises sequences required for proper translation of the nucleotide sequence. The coding region usually encodes a polypeptide(s) of interest but can also encode a functional RNA of interest, for example antisense RNA or a non-translated RNA, in the sense or antisense direction. The expression cassette comprising the nucleotide sequence of interest can be chimeric, meaning that at least one of its components is heterologous with respect to at least one of its other components. The expression cassette can also be one that is naturally occurring but has been obtained in a recombiNanchungt form useful for heterologous expression. Typically, however, the expression cassette is heterologous with respect to the host; i.e., the particular DNA sequence of the expression cassette does not occur naturally in the host cell and was introduced into the host cell or an ancestor of the host cell by a transformation event. The expression of the nucleotide sequence in the expression cassette can be under the control of a constitutive promoter or of an inducible promoter that initiates transcription only when the host cell is exposed to some particular external stimulus. In the case of a multicellular organism such as a plant, the promoter can also be specific to a particular tissue, organ, or stage of development.

[0099] The term “adenovirus” refers to a vector derived from an adenovirus serotype. Adenoviruses are double-stranded DNA viruses capable of infecting broad range of mammalian cells, both dividing and non-dividing. The adenovirus DNA is linear of approximately 36,000 bp. The most widely used adenoviral vectors for gene delivery are the replication-deficient vectors, in which the E1 and E3 regions of the adenoviral genome are deleted. E1-deleted viruses are propagated in complementing cells, such as HEK-293, which provide E1-encoded proteins in trans. E1/E3-deleted adenoviruses can accommodate up to 7.5 kb of foreign DNA. The classical method of incorporating foreign DNA into adenovirus genome involves homologous recombination in mammalian cells. More efficient method, as described in the present examples involves homologous recombination in Escherichia coli between a large plasmid containing most of the adenovirus genome and a small shuttle plasmid. The shuttle plasmid contains the expression cassette flanked by sequences homologous to the region to be targeted in the viral genome. The recombiNanchungt Ad genome is then linearized by restriction digestion and used to transfect E1-complementing mammalian cells to produce viral particles (Douglas JT., Methods Mol Biol. 2004; V246:3-14) To produce adenoviruses containing toxic gene, special adenoviral vectors have been developed where expression of foreign gene is suppressed during virus production. One of these systems, named, SpeAd Ad-teto system is offered by, for example, Welgen, Inc.

[0100] The term “tetracycline-controlled transactivator” (tTA) refers to a fusion protein used to control nucleic acid expression in the presence or absence of doxyclycline, tetracycline and related compounds. The tTA includes a Tet repressor (TetR) fused to any domain capable of activating transcription. The tTA may include a TetR fused to a C-terminal portion of adenovirus.

[0101] The term “operably linked” refers to two nucleic acid sequences that are related physically or functionally. For example, a promoter or regulatory DNA sequence is said to be “operably linked to” a DNA sequence that encodes an RNA or a polypeptide if the two sequences are situated such that the regulatory DNA sequence will affect the expression level of the coding or structural DNA sequence. A promoter is also said to be operably linked to a nucleotide sequence if when an RNA polymerase binds to the promoter under conditions sufficient for transcription, the nucleotide sequence is transcribed.

[0102] The term “isolated,” when applied to a nucleic acid or polypeptide, denotes that the nucleic acid or polypeptide is essentially free of other cellular components with which it is associated in the natural state. It can be in a homogeneous state although it can be in either a dry or aqueous solution. Homogeneity and whether a molecule is isolated can be determined using analytical chemistry techniques such as polyacrylamide gel electrophoresis or high performance liquid chromatography. A polypeptide that is the predominantly Nanchung species present in a preparation is substantially isolated. The term “isolated” denotes that a nucleic acid or polypeptide gives rise to essentially one band in an electrophoretic gel. Particularly, it means that the nucleic acid or polypeptide is in some embodiments at least about 50% pure, in some embodiments at least about 85% pure, and in some embodiments at least about 99% pure.

[0103] The terms “label” and “labeled” refer to the attachment of a moiety, capable of detection by spectroscopic, radiologic, or other methods, to a molecule. Thus, the terms “label” or “labeled” refer to incorporation or attachment, optionally covalently or non-covalently, of a detectable marker into a molecule, such as a biomolecule. Various methods of labeling biomolecules are known in the art and can be used. Examples of labels for biomolecules include, but are not limited to, the following: radioisotopes, fluorescent labels, heavy atoms, enzymatic labels or reporter genes, chemiluminescent groups, and biotinyl groups. In some embodiments, labels are attached by spacer arms of various lengths to reduce potential steric hindrance. Fluorescent probe that can be utilized include, but are not limited to fluorescein isothiocyanate; fluorescein dichlorotriazine and fluorinated analogs of fluorescein; naphthofluorescein carboxylic acid and its succinimidyl ester; carboxyrhodamine 6G; pyridyloxazole derivatives; Cy2, 3, 3.5, 5, 5.5, and 7; phycoerythrin; phycoerythrin-Cy conjugates; fluorescent species of succinimidyl esters, carboxylic acids, isothiocyanates, sulfonyl chlorides, and dansyl chlorides, including propionic acid succinimidyl esters, and pentanoic acid succinimidyl esters; succinimidyl esters of carboxytetramethylrhodamine; rhodamine Red-X succinimidyl ester; Texas Red sulfonyl chloride; Texas Red-X succinimidyl ester; Texas Red-X sodium tetrafluorophenol ester; Red-X; Texas Red dyes; tetramethylrhodamine; lissamine rhodamine B; tetramethylrhodamine; tetramethylrhodamine isothiocyanate; naphthofluoresceins; coumarin derivatives (e.g., hydroxycoumarin, aminocoumarin, and methoxycoumarin); pyrenes; pyridyloxazole derivatives; dapoxyl dyes; Cascade Blue and Yellow dyes; benzofuran isothiocyanates; sodium tetrafluorophenols; 4,4-difluoro-4-bora-3a,4a-diaza-s-indacene; Alexa fluors (e.g., 350, 430, 488, 532, 546, 555, 568, 594, 633, 647, 660, 680, 700, and 750); isotope of hydrogen (e.g., tritium isotope, 3H), isotope of carbon (e.g., 14C) green fluorescent protein; yellow fluorescent protein or red fluorescent protein. The peak excitation and emission wavelengths will vary for these compounds and selection of a particular fluorescent probe for a particular application can be made in part based on excitation and/or emission wavelengths.

[0104] As used herein, the terms “candidate compound” or “test compound” refer to the collection of compounds that are to be screened for their ability to bind to Nanchung proteins, Water witch protein, Nanchung and Inactive protein complexes, Nanchung and Water witch protein complexes and/or modulate insect TRPV channels and/or insect TRPA channels. The candidate compounds may encompass numerous classes of chemical molecules, e.g., small organic or inorganic molecules, polysaccharides, biological macromolecules, e.g., peptides, proteins, peptide analogs and derivatives, peptidomimetics, nucleic acids, nucleic acid analogs and derivatives, an extract made from biological materials such as bacteria, plants, fungi, or animal cells or tissues, naturally occurring or synthetic compositions, or combinations thereof. Generally, the candidate compounds can have a molecular weight of about 50 to 500,000, but is not limited thereto.

[0105] As used herein, the term “small molecule” refers to a compound that is “natural product-like,” however, the term “small molecule” is not limited to a “natural product-like” compound. Rather, a small molecule is typically characterized in that it contains several carbon-carbon bonds, and has a molecular weight more than about 50, but less than about 5000 Daltons (5 kD). Preferably the small molecule has a molecular weight of less than 3 kD, still more preferably less than 2 kD, and most preferably less than 1 kD. In some cases it is preferred that a small molecule have a molecular mass equal to or less than 700 Daltons.

[0106] In some embodiments, the candidate compound may be a synthetic molecule. The term “synthetic molecule” refers to a molecule that does not occur in nature.

[0107] In certain embodiments, the candidate compound may be a naturally-occurring molecule. Such a naturally-occurring molecule may be used in a purified or unpurified form, i.e., as obtained from the biological source. The term “naturally occurring” refers to an entity (e.g., a cell, biomolecule, etc.) that is found in nature as distinct from being artificially produced by man. For example, a polypeptide or nucleotide sequence that is present in an organism in its natural state, which has not been intentionally modified or isolated by man in the laboratory, is naturally occurring. As such, a polypeptide or nucleotide sequence is considered “non-naturally occurring” if it is encoded by or present within a recombiNanchungt molecule, even if the amino acid or nucleic acid sequence is identical to an amino acid or nucleic acid sequence found in nature.

[0108] Depending upon the particular embodiment being practiced, the candidate compounds may be provided free in solution, or may be attached to a carrier, or a solid support, e.g., beads. A number of suitable solid supports may be employed for immobilization of the candidate compounds. Examples of suitable solid supports include agarose, cellulose, dextran (commercially available as, i.e., Sephadex, Sepharose) carboxymethyl cellulose, polystyrene, polyethylene glycol (PEG), filter paper, nitrocellulose, ion exchange resins, plastic films, polyaminemethylvinylether maleic acid copolymer, glass beads, amino acid copolymer, ethylene-maleic acid copolymer, nylon, silk, etc. Additionally, for the methods described herein, the candidate compounds may be screened individually, or in groups. Group screening is particularly useful where hit rates for effective candidate compounds are expected to be low such that one would not expect more than one positive result for a given group.

[0109] There are millions of possible candidate compounds. Methods for developing small molecule, polymeric and genome-based libraries are known and described, for example, in Ding, et al. J. Am. Chem. Soc. 124: 1594-1596 (2002) and Lynn, et al., J. Am. Chem. Soc. 123: 8155-8156 (2001). A number of small molecule libraries are known in the art and commercially available. Commercially available compound libraries can be obtained from, e.g., ArQule, Pharmacopia, graffinity, Panvera, Vitas-M Lab, Biomol International and Oxford. These libraries can be screened using the screening methods described herein. Chemical compound libraries such as those from of 10,000 compounds and 86,000 compounds from NIH Roadmap, Molecular Libraries Screening Centers Network (MLSCN) can also be used. A comprehensive list of compound libraries can be found at www.broad.harvard.edu/chembio/platform/screening/compound_libraries/index.htm. A chemical library or compound library is a collection of stored chemicals usually used ultimately in high-throughput screening or industrial manufacture. The chemical library can consist in simple terms of a series of stored chemicals. Each chemical has associated information stored in some kind of database with information such as the chemical structure, purity, quantity, and physiochemical characteristics of the compound.

[0110] The term “modulate” refers to an increase, decrease, or other alteration of any, or all, chemical and/or biological activities and/or properties of a biomolecule, such as the TRPV or TRPA (e.g., insect TRPV or TRPA) channel of the present invention. The term “modulation” as used herein thus refers to both upregulation (i.e., activation or stimulation) and downregulation (i.e., inhibition or suppression) of such an activity or property. As would be understood by one of ordinary skill in the art, a modulation of a chemical and/or biological activity and/or property of a biomolecule, such as TRPV or TRPA channel, can result from an increase or decrease in the expression of the biomolecule in a cell. Accordingly, the terms “modulate” and grammatical variants thereof are intended to encompass both direct modulation (e.g., inhibition of a chemical and/or biological activity and/or property of a polypeptide via binding of an inhibitor to the polypeptide) as well as indirect modulation (e.g., upregulation or downregulation of expression of a protein, such as a TRPV or TRPA channel or inhibition or stimulation of a biomolecule that acts together with a biomolecule of the presently disclosed subject matter to produce a biological effect).

[0111] The term “endogenous modulator” refers to the modulator originating or produced within an organism, tissue, or cell.

[0112] The term “exogenous modulator” refers to the modulator originating or produced from outside organism, tissue, or cell.

[0113] The terms “polypeptide,” “protein,” and “peptide,” which are used interchangeably herein, refer to a polymer of the 20 protein amino acids, or amino acid analogs, regardless of its size or function. Although “protein” is often used in reference to relatively large polypeptides, and “peptide” is often used in reference to small polypeptides, usage of these terms in the art overlaps and varies. The term “polypeptide” as used herein refers to peptides, polypeptides, and proteins, unless otherwise noted. The terms “protein,” “polypeptide,” and “peptide” are used interchangeably herein when referring to a gene product. Thus, exemplary polypeptides include gene products, naturally occurring proteins, homologs, orthologs, paralogs, fragments and other equivalents, variants, and analogs of the foregoing.

[0114] The term “TRP channel” refers to a channel and/or a protein complex formed from one or more of the following: Nanchung protein and/or Water witch protein and/or Inactive protein. It is to be understood that the TRPV channel and/or TRPV protein complex is a type of TRP channel and/or TRP protein complex. Nanchung proteins and Inactive proteins are a type of TRPV proteins which are a type of TRP proteins. Water witch protein is a type of TRPA proteins which are a type of TRP proteins. TRP proteins may be found in insect cellular membranes; mammalian cellular membranes; derived from a free cell system; produced by a cell culture; and/or produced by cells, including but not limited to a frog egg, insect cell, and/or mammalian cell, that have been genetically modified (including either or both DNA and/or RNA) to include the genes coding for one or more of the Nanchung proteins, Water witch proteins and/or the Inactive proteins. It is to be understood that the TRP proteins disclosed herein may be mammalian TRP proteins and/or arthropod TRP proteins and/or Nematode TRP proteins and/or Mollusk TRP proteins. It is to be further understood that Nanchung, Inactive and Water witch proteins may be found in arthropods, including, but not limited to insects, as well as Mollusks and/or Nematodes. It is to be understood that TRP and/or TRPV and/or TRPA channels may be formed from one or more TRPA and/or TRPV protein complexes; from two or more TRPA and/or TRPV protein complexes; from three or more TRPA and/or TRPV protein complexes, and/or from four or more TRPA and/or TRPV protein complexes.

[0115] The term “binding affinity” refers to the ability of compounds to form a bond with a receptor. For purposes of this invention, an equilibrium constant is used to determine the binding affinity of one or more compounds with the one or more Nanchung proteins, Inactive proteins, Water witch proteins, TRP channels and/or TRPV channels and/or TRPA channels. A dissociation constant (Kd) is a specific type of equilibrium constant measured in a labeled compound saturation binding assay. It is the molar concentration of labeled compound that binds to half the receptor sites at equilibrium. The lower the dissociation constant the higher the binding affinity of the candidate compound for the Nanchung protein, Inactive protein, Water witch protein and/or complexes formed by Nanchung and Inactive proteins and/or complexes formed by Nancung and Water witch proteins. An inhibition constant (Ki) is a specific type of equilibrium constant that is measured using competition binding of an unlabeled compound with a labeled compound. It is the molar concentration of the competing unlabeled compound that would occupy 50% of the receptors at equilibrium, if no labeled compound was present. It can be calculated using the Cheng and Prusoff equation: Kᵢ=IC₅₀/(1+[L]/K_{d}) where IC₅₀ is the molar concentration of competing unlabeled compound which reduces the specific binding of a labeled compound by 50%. In this equation [L] is the molar concentration of a labeled compound in the assay; Kd is equilibrium dissociation constant for a labeled compound. In addition to saturation binding assay, equilibrium dissociation constant, Kd can be measured in multiple ways, including but not limited to:
[0116] 1. Using the association and dissociation rates constants where Kd=Koff/Kon
[0117] 2. Using a fluorescence polarization assay
[0118] 3. Using surface plasmon resonance
[0119] 4. Using thermophoresis
[0120] 5. Using isothermal calorimetry
[0121] 6. Using Schild analysis
Surface plasmon resonance and isothermal calorimetry do not require labeled compound to measure K_{d}. In addition, for the competition assay, K_{d} and/or Ki (for competition assay) may be calculated using one or more of the following: Cheng and Prusoff equation, fluorescence polarization, and/or Schild analysis. It is to be understood that the K_{d} and Ki values calculated for a compound should be similar, but due to experimental error the values may have less than a two-fold difference between the two values or less than a three-fold difference between the two-values depending upon the extent of the experimental error.

[0122] The term “high affinity” and/or “high binding affinity” refers to a compound whose equilibrium dissociation constant (K_{d}) and/or equilibrium inhibition constant (Ki) is calculated as being less than or equal to 3x10⁻⁷ M, less than or equal to 3x10⁻⁸ M, and/or less than or equal to 30x10⁻¹² M. The lower the K_{d} or Kᵢ the higher the binding affinity for the compound.

[0123] The term “mode of action” refers to the classification of a compound and/or a composition according to the Insecticide Resistance Action Committee (IRAC) into the appropriate group based on the compound and/or composition (a) exhibiting the same function as other insecticides in that group and (b) binding directly to the same site on particular proteins, protein complexes and/or protein channels as other compounds and/or compositions in that group.

[0124] The term “insecticide” refers to a substance or agent used to kill insects and other arthropods.

[0125] The term “repellent” refers to a substance or agent used to repel insects and other arthropods.

### III. Screening Methods

[0126] The inventors have discovered that insect TRPA Water witch proteins and insect TRPV Nanchung proteins physically associate with each other and form complexes consisting of one or more TRPV Nanchung proteins and one or more TRPA Water witch proteins.

[0127] Furthermore, the inventors have discovered that complexes consisting of one or more TRPA Water witch proteins and one or more TRPV Nanchung proteins can form ion channels. As such, in one embodiment, the present invention relates to a method for determining whether or not a candidate compound is a modulator of an insect TRPA Water witch channels and/or complexes consisting of TRPA Water witch channels and TRPV Nanchung channels.

[0128] Furthermore, the inventors have discovered that ion channels formed by TRPA Water witch proteins and/or ion channels formed by one or more TRPA Water witch proteins and one or more TRPV Nanchung proteins may be used to identify compounds that kill insects and/or disrupt insect behavior and/or repel insects and thus be useful as insecticides and/or repellents.

[0129] Furthermore, the inventors have discovered that determining whether or not a candidate compound is a modulator of an insect TRPA Water witch channels and/or complexes consisting of TRPA Water witch channels and TRPV Nanchung channels may assist with the classification of a compound’s mode of action.

[0130] Furthermore, the inventors have determined that a compound, afidopyropen, binds with high affinity to protein complexes consisting of one or more TRPV Nanchung proteins and one or more TRPA Water witch proteins.

[0131] The inventors have further discovered methods of identifying compounds that bind directly to the complexes formed by one or more TRPV Nanchung proteins and one or more TRPA Water witch proteins.

[0132] Furthermore, the inventors have found that methods of identifying compounds that bind directly to the complexes formed by one or more TRPV Nanchung proteins and one or more TRPA Water witch proteins may be used to identify compounds that kill insects and/or disrupt insect behavior and/or repel insects and thus be useful as insecticides and/or repellents.

[0133] Furthermore, the inventors have discovered that determining whether or not different compounds bind to the same or different sites of the complexes consisting of TRPA Water witch protein and TRPV Nanchung protein may assist with the classification of a compound’s mode of action.

[0134] The methods identified herein includes providing one or more Nanchung proteins, and/or one or more Water witch proteins contacting the first cell with a candidate compound; and assaying for modulation of the ion channel formed by TRPA Water witch protein and/or ion channels comprising one or more TRPV Nanchung proteins and one or more TRPA Water witch protein. Modulation of the ion channel formed by TRPA Water witch protein and/or ion channels comprising one or more TRPV Nanchung proteins and one or more TRPA Water witch protein may be assayed using conventional in vitro and in vivo methods well known to the skilled artisan. For example, in certain embodiments, the assaying step may include (1) detecting calcium ion mobilization in the first cell in response to the candidate compound, (2) detecting a membrane potential in the first cell in response to the candidate compound, (3) comparing calcium ion mobilization in the first cell in the absence of the candidate compound with calcium ion mobilization in the first cell in the presence of the candidate compound. For example, calcium response may be measured by assessment of the uptake of Ca²⁺ or by using fluorescent dyes, such as Fluo-4 or Fura-2 or fluorescent proteins, such as Cameleon or GCaMP6m, (4) comparing a membrane potential in the first cell in the absence of the candidate compound with a membrane potential in the first cell in the presence of the candidate compound, (5) comparing calcium ion mobilization in the first cell in the presence of the candidate compound with calcium ion mobilization reference level indicative of no modulation of the of the ion channel formed by TRPA Water witch protein and/or ion channels comprizing one or more TRPV Nanchung proteins and one or more TRPA Water witch protein, and/or (6) comparing a membrane potential in the first cell in the presence of the candidate compound with a membrane potential reference level indicative of no modulation of the ion channel formed by TRPA Water witch protein and/or ion channels comprising one or more TRPV Nanchung proteins and one or more TRPA Water witch protein (7) comparing ion currents in the first cell in the absence of the candidate compound with a ion currents in the first cell in the presence of the candidate compound using standard electrophysiology methods, such as voltage clamp or patch clamp. It is to be understood that this same assay could be run on insect TRPV and/or TRPA channels from vertebrate, arthropod, mollusks, nematodes or any other organisms. Such a test would allow one to determine whether or not the candidate compound worked as a modulator is those systems and thus, help one determine the potential environmental impact of using the candidate compound as an insecticide.

[0135] Preferably, the candidate compound may modulate the calcium ion mobilization or the membrane potential, or ion currents in the first cell by at least 10% relative to the reference level; more preferably at least 20% relative to the reference level; more preferably at least 30% relative to the reference level; more preferably at least 40% relative to the reference level; more preferably at least 50% relative to the reference level; more preferably at least 60% relative to the reference level; more preferably at least 70% relative to the reference level; more preferably at least 75% relative to the reference level; more preferably at least 80% relative to the reference level; more preferably at least 85% relative to the reference level; more preferably at least 90% relative to the reference level; and more preferably at least 95% relative to the reference level.

[0136] In addition, modulation of ion channels formed by TRPA Water witch protein and/or ion channels comprising one or more TRPV Nanchung proteins and one or more TRPA Water witch protein may be assayed using a variety of other conventional assays that measure changes in ion fluxes including, but not limited to, patch clamp techniques, measurement of whole cell currents, radiolabeled ion flux assays, and fluorescence assays using voltage sensitive dyes (Zheng et al., 2004).

[0137] Modulation of ion channels formed by TRPA Water witch protein and/or ion channels comprising one or more TRPV Nanchung proteins and one or more TRPA Water witch protein may also be assessed using a variety of other in vitro and in vivo assays to determine functional, chemical, and physical effects, e.g., measuring the binding of the insect insect TRPV and/or TRPA channels to other molecules, including peptides, small organic molecules, and lipids; measuring insect TRPV and/or TRPA protein and/or mRNA levels, or measuring other aspects of insect TRPV and/or TRPA polypeptides, e.g., transcription levels, or physiological changes.

[0138] The inventors have further determined that it is beneficial to identify compounds that bind directly to complexes formed by one or more TRPV Nanchung proteins and one or more TRPA Water witch protein and thus be useful as insecticides or repellents.

[0139] There are two variations of binding assays, a saturation assay and a competition assay. The saturation assay may include at least one of the following steps: (1) contacting the one or morecomplexes formed by Nanchung and Water witch proteins with a labeled compound; (2) measuring theamount of the labeled compound which is bound to the one or more complexes formed by Nanchung and Water witch proteins; (3) calculating the equilibrium inhibitor constant dissociation constant (K_{d}) for the labeled compound (4) wherein the K_{d} may be determined using a (a) maximum binding (Bₘₐₓ) and (b) the concentration of the compound needed to reach 50% of maximum binding.

[0140] The competition assay may include one or more of the following steps: (1) contacting the one or more complexes formed by Nanchung and Water witch proteins with two compounds, wherein one compound is labeled and another compound is unlabeled; (2) .measuring the amount of the labeled compound which is bound to the one or more complexes formed by Nanchung and Water witch proteins at single concentration of labeled compound and various concentrations of unlabeled compound; (3) determining the concentration of the unlabeled compound which produces 50% maximal binding of labeled compound (IC₅₀); (4) calculating the equilibrium inhibitory constant (Ki) for the unlabeled compound; (4) wherein Ki can be determined from (a) IC50 of unlabeled compound, (b) Kd of labeled compound and (c) concentration of labeled compound.

[0141] The competition binding assay also determines whether labeled and unlabeled compounds bind to the same or different parts of the complexes formed by Nanchung and Water witch proteins.

[0142] Binding to the complexes formed by Nanchung and Water witch proteins may also be determined using one or more of the following methods: (I) thermoforesis (II) fluorescence polarization assay, (III) surface plasmon resonance, and (IV) isothermal calorimetry.

[0143] Identification of molecular targets of insecticides is essential for assessing their spectra, health and environmental impacts, as well as for insect resistance management. Pymetrozine (PM) and afidopyropen (AP) ) are two commercial insecticides which act by disrupting coordination and feeding of plant-sucking insects such as aphids and whiteflies leading to death caused by starvation and dessication (Casida and Durkin, 2013; Maienfisch, 2012).

[0144] The inventors have previously shown that PM and AP act by directly binding protein Nanchung, a member of vanniloid-type (TRPV) ion channels (Kandasamy et al., 2017) Binding to Nanchung protein alone, however, was not sufficient to modulate the ion channels. Biological activity of PM and AP required simultaneous presence of another member of TRPV proteins, Inactive (Kandasamy et al., 2017; Nesterov et al., 2015). Together Nanchung and Inactive formed a functional complex, which responded to PM and AP by calcium mobilization and depolarization of plasma membrane. Moreover, whrereas PM and AP could bind Nanchung in the absence of Inactive, the presence of Inactive greatly increased the binding affinity (Kandasamy et al., 2017).

[0145] The current invention shows that analogous to TRPV ion channel Inactive, ankyrin-type (TRPA) channel, Water witch can form a functional complex with TRPV channel Nanchung. The current invention also found that complexes formed by Nanchung and Water witch proteins can be activated by PM and AP similarly to complexes formed by Nanchung and Inactive proteins. The inventors also found that complexes formed by both Nanchung and Inactive proteins and Nanchung and Water witch proteins can be activated by the endogenous modulator, nicotinamide. The inventors also found that analogous to co-expression of Inactive together with Nanchung, co-expression of Water witch together with Nanchung greatly potentiates binding of afidopyropen to Nanchung. As such, the inventors found that with regard to both function and binding complexes formed by Nanchung and Water witch proteins are functionally similar to complexes formed by Nanchung and Inactive proteins. This finding was unexpected because Inactive and Water witch belong to different types of TRP channels, vanilloid-type and ankyrin-type, respectively. Furthemore, based on amino acid sequence alignment Water witch shares only 22% sequence identity with Inactive (FIG. 8). The inventors also found that endogenous modulator nicotinamide and exogenous modulators AP and PM have overlapping binding sites. The inventors also found that channels formed by Whater witch protein and channels formed by Nanchung and Water witch proteins can be activated by plant-derived compounds cinnamaldehyde and allyl isothiocyanate which can act as insecticides and/or insect repellents. This finding was unexpected because the main target of these compounds is thought to be insect TRPA1 protein. Furhemore, based on amino acid sequence, Water witch protein has been predicted not to be a target of cinnamaldehyde and allyl isothiocyanate (Kang et al., 2010) Thus, the current invention identifies methods of determining whether or not a candidate compound modulates activity of Water witch protein and/or complexes formed by Nanchung protein and Water witch protein. Identifying such modulators allows for identification of new insecticides and/or insect repellents. Furthermore, the current invention identifies methods of detecting binding, calculating binding affinity and determining whether or not a candidate compounds binds directly to the same or different sites on complexes formed by Nanchung and Water witch proteins. Determining the binding location and affinities for candidate compounds allows for identification of new insecticides and/or insect repellents, assists with the classification of a compounds mode of action and allows for better insect management and control that may result in decreased risk of developing resistant insect populations.

[0146] As noted previously, the candidate compound may be a small organic molecule, small inorganic molecule, polysaccharides, peptides, proteins, nucleic acids, an extract made from biological materials such as bacteria, plants, fungi, animal cells, animal tissues, and any combination thereof.

[0147] Generally, a candidate compound can be tested at any concentration that can modulate the activity of a ion channel formed by Water witch protein, and/or activity of ion channel formed by complexes comprising one or more Nanchung protein and one or more Water witch protein, and/or exhibit binding to complexes comprising one or more Nanchung protein and one or more Water witch protein. In some embodiments, the candidate compound may be tested at a concentration in the range of about 0.01 nM to about 1000 mM. In certain other embodiments, the compound may be tested in the range of about 100 µM to about 1000 µM. In certain further embodiments, the candidate compound may be tested at greater than 0.05 mM, 0.1 mM, 0.2 mM, 0.3 mM, 0.4 mM, 0.5 mM, 0.6 mM, 0.7 mM, 0.8 mM, 0.9 mM, 1 mM, 1.1 mM, 1.2 mM, 1.3 mM, 1.4 mM, 1.5 mM, 1.6 mM, 1.7 mM, 1.8 mM, 1.0 mM, or 2 mM. Other ranges and concentrations of the candidate compound may also be suitable.

[0148] In some embodiments, the candidate compound may be tested at two or more different concentrations. Preferably the highest concentration tested is at least 2×, at least 3×, at least 4×, at least 5×, at least 6×, at least 7×, at least 8×, at least 9×, at least 10×, at least 15×, at least 20×, at least 25×, at least 50×, at least 75×, at least 100×, at least 200×, at least 250× higher than the lowest concentration employed. For example, the candidate compound may be tested at 0.1 mM, 0.5 mM, and 1 mM, where the highest concentration is at least 10X the concentration of the lowest concentration employed.

[0149] Generally, the one or more Water witch protein, and/or complexes formed by Nanchung protein and Water witch protein may be contacted with a candidate compound for any suitable length of time before measuring the binding affinity and/or activity of the Water witch protein, and/or complexes comprising one or more Nanchung protein and one or more Water witch protein. For example, Water witch protein, and/or complexes formed by Nanchung protein and Water witch protein may be contacted with a candidate compound for at least 5 seconds, at least 10 seconds, at least 15 seconds, at least 30 seconds, at least 45 seconds, at least 1 minute, at least 2 minutes, at least 3 minutes, at least 4 minutes, at least 5 minutes, at least 10 minutes, at least 15 minutes, at least 30 minutes, at least 60 minutes, at least 2 hours, at least 3 hours or more before activity of Water witch protein, and/or complexes formed by Nanchung protein and Water witch protein is measured. In some embodiments, activity may be measured at the instant when Water witch protein, and/or complexes formed by Nanchung protein and Water witch protein are contacted with a candidate compound.

[0150] In some embodiments, the binding affinity and/or activity of Water witch protein, and/or complexes formed by Nanchung protein and Water witch protein may be measured over a period of time. For example, activity may be measured for a period of at least 5 seconds, at least 10 seconds, at least 15 seconds, at least 30 seconds, at least 45 seconds, at least 1 minute, at least 2 minutes, at least 3 minutes, at least 4 minutes, at least 5 minutes, at least 10 minutes, at least 15 minutes, at least 30 minutes, at least 60 minutes, at least 2 hours, at least 3 hours, at least 4 hours or more. The measurement period can start before the Water witch protein, and/or complexes formed by Nanchung protein and Water witch protein are contacted with a candidate compound, at the instant when Water witch protein, and/or complexes formed by Nanchung protein and Water witch protein are first contacted with a candidate compound or start after a period of time after the one or more Water witch protein, and/or complexes formed by Nanchung protein and Water witch protein are first contacted with a candidate compound. The Water witch protein, and/or complexes formed by Nanchung protein and Water witch protein may be continuously contacted with the candidate compound while activity and/or binding is measured.

[0151] In some embodiments, the candidate compound has an effective concentration EC50 of less than or equal to 500 nM, less than or equal to 250 nM, less than or equal to 100 nM, less than or equal to 50 nM, less than or equal to 10 nM, less than or equal to 1 nM, less than or equal to 0.1 nM, less than or equal to 0.01 nM, or less than or equal to 0.001 nM for activating and/or binding Water witch protein, and/or complexes formed by Nanchung protein and Water witch protein.

[0152] In some embodiments, the candidate compound has an IC50 of less than or equal to 500 nM, less than or equal to 250 nM, less than or equal to 100 nM, less than or equal to 50 nM, less than or equal to 10 nM, less than or equal to 1 nM, less than or equal to 0.1 nM, less than or equal to 0.01 nM, or less than or equal to 0.001 nM for inhibiting and/or binding Water witch protein, and/or complexes formed by Nanchung protein and Water witch protein.

[0153] In certain embodiments, the candidate compound is a modulator that inhibits the activity of Water witch protein, and/or complexes formed by Nanchung protein and Water witch protein.

[0154] In certain other embodiments, the candidate compound is a modulator that activates the Water witch protein, and/or complexes formed by Nanchung protein and Water witch protein.

[0155] Preferably, the candidate compound is a modulator that perturbs an insect behavior and/or kills insects and/or repels insects.

[0156] In certain embodiments the candidate compound binds directly to the complexes formed by Nanchung protein and Water witch protein

[0157] Preferably the candidate compound modulates ion channels formed by Water witch protein or ion channels formed by Nanchung protein and Water witch protein.

[0158] In certain embodiments, Water witch protein and/or complexes formed by Nanchung protein and Water witch protein is in a biological cell. The term “biological cell” or “cell” as used herein has its commonly understood meaning. Inside a cell, Water witch protein, and/or complexes formed by Nanchung protein and Water witch protein may be expressed from an endogenous gene in the cell or from at least one vector that is transfected into the cell. It is to be understood that either the cultured cell, or a cell obtained directly from animal, such as frog oocyte, or whole tissue may be used as a source of Water witch protein and/or complexes formed by Nanchung protein and Water witch protein. Preferably, Nanchung and Water witch proteins are co-expressed in the cell. The Nanchung and Water witch proteins may be co-expressed at varying rations.

[0159] In certain embodiments, Water witch protein and/or complexes formed by Nanchung protein and Water witch protein are formed in a cell-free system. The term “cell-free system” as used herein means an in vitro system used to study biological reactions that happen within cells while reducing the complex interactions found in a whole cell. Subcellular fractions can be isolated by ultracentrifugation to provide molecular machinery that can be used in reactions in the absence of many of the other cellular components. Cell-free biosystems can be prepared by mixing one or more of the following: ribosomes; and/or DNA and/or RNA encoding for one or more proteins of interest; membranes; as well as a one or more enzymes and/or coenzymes. Cell-free biosystems have several advantages suitable in industrial applications. In vitro biosystems can be easily controlled. Cell-free systems provide an alternative choice for fast protein synthesis and very high product yields are usually accomplished without the formation of by-products or synthesis of cell mass.

[0160] In certain embodiments a cell genetically modified to contain the genes coding for one or more of the Nanchung protein, and/or Water witch protein.

[0161] TRPV protein Nanchung and TRPA protein Water witch may be used to produce ion channels for purposes of the methods described herein.

[0162] In certain embodiments a nucleic acid coding for one or more TRPV protein Nanchung and/or TRPA protein Water witch be introduced into frog oocytes or other cells (parental cells) to produce the TRPA and/or TRPV channel complex for purposes of the methods described herein.

[0163] The insect TRPV and/or TRPA protein complex and/or channel used in the screening assay of the present invention may be any insect TRPV and/or TRPA protein complex and/or channel or homolog or a conservative variant thereof. For example, the TRPV and/or TRPA protein complex and/or channel may be a Drosophila TRPV and/or other member of TRPA channel superfamily. Other sources of TRPV and/or TRPA protein complex and/or channel may also be suitable for use according to the methods of the present invention.

[0164] In some embodiments, the Nanchung nucleic acid sequences may be selected from the group consisting of a) a polynucleotide molecule comprising a nucleic acid molecule having a sequence selected from the group consisting of SEQ ID NOS: 1-27; b) a polynucleotide molecule having at least about 70% sequence identity to the sequence of SEQ ID NOS: 1-27; and c) a fragment of the polynucleotide molecule of a) or b). Such fragments can be a UTR, a core promoter, an intron, an enhancer, a cis-element, or any other regulatory element.

[0165] In some embodiments, the Water witch nucleic acid sequences may be selected from the group consisting of a) a polynucleotide molecule comprising a nucleic acid molecule having a sequence selected from the group consisting of SEQ ID NOS: 28-63; b) a polynucleotide molecule having at least about 70% sequence identity to the sequence of SEQ ID NOS: 28-63; and c) a fragment of the polynucleotide molecule of a) or b). Such fragments can be a UTR, a core promoter, an intron, an enhancer, a cis-element, or any other regulatory element.

[0166] The disclosed polynucleotides are capable of providing for expression of Nanchung and Water witch proteins in the host cells.

[0167] In certain embodiments, the Nanchung protein sequences may be selected from the group consisting of a) a polypeptide comprising an amino acid sequence having a sequence selected from the group consisting of SEQ ID NOS: 64-90; b) a polypeptide having at least 70% sequence identity to the SEQ ID NOS: 64-90; and c) a fragment or a conservative variant of the polypeptide of a) or b).

[0168] In certain embodiments, the Water witch protein sequences may be selected from the group consisting of a) a polypeptide comprising an amino acid sequence having a sequence selected from the group consisting of SEQ ID NOS: 91-126; b) a polypeptide having at least 70% sequence identity to the SEQ ID NOS: 91-126; and c) a fragment or a conservative variant of the polypeptide of a) or b).

[0169] As used herein, the “percent sequence identity” is determined by comparing two optimally aligned sequences over a comparison window, where the portion of the polynucleotide or a polypeptide sequence in the comparison window may comprise additions or deletions (i.e., gaps) as compared to the reference sequence (which does not comprise additions or deletions) for optimal alignment of the two sequences. The percentage is calculated by determining the number of positions at which the identical nucleic acid base or amino acid residue occurs in both sequences to yield the number of matched positions, divided by the number of matched positions by the total number of positions in the window of comparison and multiplying the result by 100 to yield the percentage of sequence identity. Alignment for the purposes of determining the percentage identity can be achieved in various ways that are within the skill in the art, for example, using publicly available computer software such as BLAST. Those skilled in the art can determine appropriate parameters for measuring alignment, including any algorithms needed to achieve optimal alignment over the full length of the sequences being compared.

[0170] As used herein, the term a “conservative variant” refers to an amino acid sequence in which a first amino acid is replaced by a second amino acid or amino acid analog having at least one similar biochemical property, which can be, for example, similar size, charge, hydrophobicity or hydrogen bonding capacity. For example, a first hydrophobic amino acid can be conservatively substituted with a second (non-identical) hydrophobic amino acid such as alanine, valine, leucine, or isoleucine, or an analog thereof. Similarly, a first basic amino acid can be conservatively substituted with a second (non-identical) basic amino acid such as arginine or lysine, or an analog thereof. In the same way, a first acidic amino acid can be conservatively substituted with a second (non-identical) acidic amino acid such as aspartic acid or glutamic acid, or an analog thereof or an aromatic amino acid such as phenylalanine can be conservatively substituted with a second aromatic amino acid or amino acid analog, for example tyrosine. In some embodiments, the peptide comprises conservative variant substitution of at least one amino acid, e.g. 1, 2, 3, 4, 5, 6, 7, 8, 9, 10 or more amino acids. Typically, a conservative variant will retain at least 50%, 55%, 60%, 65%, 70%, 75%, 80%, 85%, 90%, 95%, 97%, 98%, 99% or more of the activity of the wild-type peptide sequence.

[0171] Exemplary conservative variant substitution include, but are not limited to, replacement of Alanine (A) with D-ala, Gly, Aib, β-Ala, Acp, L-Cys, or D-Cys; Arginine (R) with D-Arg, Lys, D-Lys, homo-Arg, D-homo-Arg, Met, Be, D-Met, or D-Ile; Asparagine (N) with D-Asn, Asp, D-Asp, Glu, D-Glu, Gln, or D-Gln; Aspartic acid (D) with D-Asp, D-Asn, Asn, Glu, D-Glu, Gln, or D-Gln; Cysteine (C) with D-Cys, S-Me-Cys, Met, D-Met, Thr, or D-Thr; Glutamine (Q) with D-Gln, Asn, D-Asn, Glu, D-Glu, Asp, or D-Asp; Glutamic Acid (E) with D-Glu, D-Asp, Asp, Asn, D-Asn, Gln, or D-Gln; Glycine (G) with Ala, D-Ala, Pro, D-Pro, Aib, β-Ala, or Acp; Isoleucine (I) with D-Ile, Val, D-Val, AdaA, AdaG, Leu, D-Leu, Met, or D-Met; Leucine (L) with D-Leu, Val, D-Val, AdaA, AdaG, Leu, D-Leu, Met, or D-Met; Lysine (K) with D-Lys, Arg, D-Arg, homo-Arg, D-homo-Arg, Met, D-Met, Ile, D-Ile, Orn, or D-Orn; Methionine (M) with D-Met, S-Me-Cys, Be, D-Ile, Leu, D-Leu, Val, or D-Val; Phenylalanine (F) with D-Phe, Tyr, D-Thr, L-Dopa, His, D-His, Trp, D-Trp, Trans-3,4 or 5-phenylproline, AdaA, AdaG, cis-3, 4 or 5-phenylproline, Bpa, or D-Bpa; Proline (P) with D-Pro, L-I-thioazolidine-4-carboxylic acid, or D- or -L-1-oxazolidine-4-carboxylic acid (U.S. Pat. No. 4,511,390); Serine (S) with D-Ser, Thr, D-Thr, allo-Thr, Met, D-Met, Met (O), D-Met (O), L-Cys, or D-Cys; Threonine (T) with D-Thr, Ser, D-Ser, allo-Thr, Met, D-Met, Met (O), D-Met (O), Val, or D-Val; Tyrosine (Y) with D-Tyr, Phe, D-Phe, L-Dopa, His, or D-His; and Valine (V) with D-Val, Leu, D-Leu, Ile, D-Ile, Met, D-Met, AdaA, or AdaG.

[0172] Conservative variants of the insect or mammalian TRPV and/or TRPA channels can be prepared according to methods for altering peptide sequences known in the art, and include those that may be found in references, which compile such methods, e.g., Molecular Cloning: A Laboratory Manual, J. Sambrook, et al., eds., Second Edition, Cold Spring Harbor, or Current Protocols in Molecular Biology, F. M. Ausubel, et al., eds., John Wiley & Sons, Inc. New York.

[0173] Conservative variants of TRPV and/or TRPA channel may also be made by alteration of a nucleic acid encoding the TRPV and/or TRPA polypeptide.

[0174] In certain embodiments, the screening method of the present invention may be a high-throughput screening. High-throughput screening (HTS) refers to a method for scientific experimentation that uses robotics, data processing and control software, liquid handling devices, and sensitive detectors. High-Throughput Screening or HTS allows a researcher to quickly conduct millions of biochemical, genetic or pharmacological tests. HTS is well known in the art, including, for example, U.S. Pat. Nos. 5,976,813; 6,472,144; 6,692,856; 6,824,982; and 7,091,048.

[0175] HTS uses automation to run a screen of an assay against a library of candidate compounds. An assay is a test for specific activity: usually inhibition or stimulation of a biochemical or biological mechanism. Specifically, an assay would be screening for inhibition or stimulation of the insect TRPV channel. Typical HTS screening libraries or “decks” can contain from 100,000 to more than 2,000,000 compounds.

[0176] The key labware or testing vessel of HTS is the microtiter plate, which is a small container, usually disposable and made of plastic that features a grid of small, open divots called wells. Modern microplates for HTS generally have either 384, 1536, or 3456 wells. These are all multiples of 96, reflecting the original 96 well microplate with 8×12 9 mm spaced wells.

[0177] To prepare for an assay, a researcher fills each well of the plate with the appropriate reagents that he or she wishes to conduct the experiment with. After some incubation time has passed to allow the reagent to absorb, bind to, or otherwise react (or fail to react) with the compounds in the wells, measurements are taken across all the plate’s wells, either manually or by a machine. Manual measurements are often necessary when the researcher is using microscopy to (for example) seek changes that a computer could not easily determine by itself. Otherwise, a specialized automated analysis machine can run a number of experiments on the wells such as current or voltage measurements, colorimetric measurements, radioactivity counting, etc. In this case, the machine outputs the result of each experiment as a grid of numeric values, with each number mapping to the value obtained from a single well. A high-capacity analysis machine can measure dozens of plates in the space of a few minutes like this, generating thousands of experimental data points very quickly.

### IV. Formulations, Applications and Uses

[0178] In another aspect, the invention provides a compound selected by the screening assay described herein. It is to be understood that analogs, derivatives, isomers, and pharmaceutically acceptable salts of the compounds selected by the screening assays described herein as well as any formulations including the selected compound are also included herein.

[0179] The compound or group of compounds being determined or identified by the method according to the invention can be used in methods of insect control, e.g., by modulating insect feeding behavior. The identified compounds, analogs, derivatives, isomers, and pharmaceutically acceptable salts thereof are also referred to as “active agents” or “active ingredients” herein.

[0180] Without being bound by theory, the modulation of an insect TRPV and/or TRPA channels elicits a signaling pathway which may kill insect, perturb insect behavior or repel insect. Thus, in some embodiments, the method comprises modulation of TRPV ion channel and/or TRPA channel with a compound identified by a screening method described herein.

[0181] Accordingly, in certain embodiments, the invention provides a method of insect control by killing insects, perturbing insect behaviour or repelling an insect using a compound identified by the screening methods described herein. As used in context of methods of insect control, compounds identified by the screening methods described herein also include analogs, derivatives, isomers and pharmaceutically acceptable salts of such compounds.

[0182] In one embodiment, the methods and active agents described herein are applicable to insects that are agricultural or horticultural pest.

[0183] Examples of agricultural pests include, but are not limited to,Aphids (including Aphis fabae, Aphis gossypii, Aphis pomi, Aulacorthum solani, Brevicoryne brassicae, Dysaphis plantaginea, Macrosiphum euphorbiae, Macrosiphum euphorbiae, Macrosiphum rosae, Myzus persicae, Nasonovia ribisnigri); Whiteflies (including Aleurodes spp., Bemisia spp., Dialeurodes spp., Trialeurodes spp.); Planthoppers (including Laodelphax striatellus, Nilaparvata lugens, Siphanta spp., Sogatella furcifera); Leafhoppers (including Amrasca spp., Empoasca spp.); Scales (including Aspidiotus spp., Chrysomphalus aonidum, Icerya purchase, Unaspis citri); Mealybugs (including Maconellicoccus spp., Paracoccus spp., Planococcus spp.); Pollen beetles (including Carpophilus spp., Meligethes spp.); Thrips (including Caliothrips spp., Frankliniella spp., Scirtothrips spp., Thrips spp.); and Psyllids (including Bactericera spp., Cacopsylla spp., Diaphorina citri, Paratrioza cockerelli).

[0184] For example, vegetable and cole crops are sensitive to infestation by one or more of the following insect pests: aphids, brown plant hopper, alfalfa looper, armyworm, beet armyworm, artichoke plume moth, cabbage budworm, cabbage looper, cabbage webworm, corn earworm, celery leafeater, cross-striped cabbagewon, european corn borer, diamondback moth, green cloverworm, imported cabbageworm, melonworm, omnivorous leafroller, pickleworm, rindworm complex, saltmarsh caterpillar, soybean looper, tobacco budworm, tomato fruitworm, tomato homworrri, tomato pinworm, velvetbean caterpillar, and yellow-striped annyworm.

[0185] Likewise, pasture and hay crops such as alfalfa, pasture grasses and silage are often attacked by pests, such as annyworm, beef annyworm, alfalfa caterpillar, European skipper, a variety of loopers and webworms, as well as yellowstriped armyworms.

[0186] Fruit and vine crops are often susceptible to attack and defoliation by achema sphinx moth, amorbia, armyworm, citrus cutworm, blackheaded fireworm, blueberry leafroller, cankerworm, cherry fruitworm, citrus cutworm, cranberry girdler, eastern tent caterpillar, fall webworm, fall webworm, filbert leafroller, filbert webworm, fruit tree leafroller, grape berry moth, grape leaffolder, grapeleaf skeletonizer, green fruitworm, gummosos-batrachedra commosae, gypsy moth, hickory shuckworm, hornworms, loopers, navel orangeworm, obliquebanded leafroller, orrinivorous leafroller, omnivorous looper, orange tortrix, orangedog, oriental fruit moth, pandemis leafroller, peach twig borer, pecan nut casebearer, redbanded leafroller, redhumped caterpillar, roughskinned cutworm, saltmarsh caterpillar, spanworm, tent caterpillar, thecla-thecla basillides, tobacco budworm, tortrix moth, tufted apple budmoth, variegated leafroller, walnut caterpillar, western tent caterpillar, and yellowstriped annyworm.

[0187] Field crops such as canola/rape seed, evening primrose, meadow foam, corn (field, sweet, popcorn), cotton, hops, jojoba, peanuts, rice, safflower, small grains (barley, oats, rye, wheat, etc.), sorghum, soybeans, sunflowers, and tobacco are often targets for infestation by insects, including: armyworm, asian and other corn borers, banded sunflower moth, beet annyworm, bollworm, cabbage looper, corn rootworm (including southern and western varieties), cotton leaf perforator, diamondback moth, european corn borer, green cloverworm, headmoth, headworm, imported cabbagewonn, loopers (including Anacamptodes spp.), obliquebanded leafroller, omnivorous leaftier, podworin, podworm, saltmarsh caterpillar, southwestern corn borer, soybean looper, spotted cutworm, sunflower moth, tobacco budworm, tobacco hornworm, velvetbean caterpillar. Bedding plants, flowers, ornamentals, vegetables and container stock are frequently fed upon by a host of insect pests such as armyworm, azalea moth, beet armyworm, diamondback moth, ello moth (hornworm). Florida fern caterpillar, oleander moth, omnivorous leafroller, omnivorous looper, and tobacco. Forests, fruit, ornamental, and nut-bearing trees, as well as shrubs and other nursery stock are often susceptible to attack from diverse insects such as bagworm, blackheaded budworm, browntail moth, california oakworm, douglas fir tussock moth, elm spanworm, fall webworm, fruit tree leafroller, greenstriped mapleworm, gypsy moth. Jack pine budworm, mimosa webworm, pine butterfly, redhumped caterpillar, saddleback caterpillar, saddle prominent caterpillar, spring and fall cankerworm, spruce budworm, tent caterpillar, tortrix, and western tussock moth.

[0188] Likewise, turf grasses are often attacked by pests such as armyworm, sod webworm, and tropical sod webworm.

[0189] It is also envisioned that the methods described herein are also applicable to pest control, wherein the pests are not insects but rather, e.g., nematodes, slugs or snails.

[0190] In one embodiment, the methods described herein are also applicable to insects that are parasites. Examples of some insect parasites are Braconid Wasps, family Braconidae; Ichneumonid Wasps, family Ichneumonidae; Chalcid Wasps, family Chalcidae; Tachinid Flies, family Tachonidae.

[0191] In certain other embodiments, the methods described herein may also be applicable to insects that are disease vectors. Vectors are organisms that can introduce a pathogen such as a bacterium or virus into a host organism to cause an infection or disease. Exemplary disease vector include, but are not limited to, mosquitoes, Ticks, Siphonaptera (fleas), Diptera (flies), Phthiraptera (lice) and Hemiptera (true bugs).

[0192] Once a compound suitable for insecticidal use is identified, the active ingredient, or formulations comprising them, may be applied directly to the target insects (i.e., larvae, pupae and/or adults), or to the locus of the insects. In one embodiment, the active ingredient or a formulation and/or composition containing the active ingredient is applied directly to the adult insect. In one embodiment, the active agent is applied directly to the larvae and/or pupae of the target insect. In another embodiment, the active ingredient is applied to the locus of the insects.

[0193] Because compounds incorporating hydrophobic moieties will penetrate the insect cuticle, active agents can be conjugated with hydrophobic moieties. Hydrophobic moieties include, but are not limited to, lipids and sterols.

[0194] In one embodiment, the active ingredient or a formulation including the active ingredient may be applied as a spray. For example, the active ingredient may be applied as an agricultural spray in aerial crop dusting, an environmental spray to control biting insects, or as a topical spray for localized control of biting insects. The active ingredient may be formulated for the purpose for spray application such as an aerosol formulation. Spray application may be accomplished with a spray pump. The active ingredient may be also encapsulated within materials such as starch, flour and gluten in granular formulations.

[0195] In certain embodiments, the active ingredient or a formulation including the active ingredient may be applied in conjunction with other insecticides and/or pesticides such as organo-phosphates, synthetic pyrethroids, carbamates, chlorinated hydrocarbons, when used in agricultural and/or environmental insect control.

[0196] The active ingredient may be administered in an amount effective to induce the desired response as determined by routine testing. The actual effective amount will of course vary with the specific active ingredient, the target insect and its stage of development, the application technique, the desired effect, and the duration of the effect, and may be readily determined by the practitioner skilled in the art. “An effective amount of active ingredient” refers to the amount of active ingredient that modulates (activates or inhibits) an insect TRPV channel and/or TRPA channel, e.g., kills insect, perturbs insect behavior or repel insect to achieve the desired insect control.

[0197] Methods of formulation are well known to one skilled in the art and are also found in Knowles, D A (1998) Chemistry and technology of agricultural formulations. Kluwer Academic, London, which is hereby incorporated by reference in its entirety. One skilled in the art will, of course, recognize that the formulation and mode of application may affect the activity of the active ingredient in a given application. Thus, for agricultural and/or horticultural use the TRPV inhibitors and/or agonists may be formulated as a granular of relatively large particle size (for example, 8/16 or 4/8 US Mesh), as water-soluble or water-dispersible granules, as powdery dusts, as wettable powders, as emulsifiable concentrates, as aqueous emulsions, as solutions, as suspension concentrate, as capsule suspensions, as soluble (liquid) concentrates, as soluble powders, or as any of other known types of agriculturally-useful formulations, depending on the desired mode of application. It is to be understood that the amounts specified in this specification are intended to be approximate only, as if the word “about” were placed in front of the amounts specified.

[0198] These formulations may be applied either as water-diluted sprays, or dusts, or granules in the areas in which insect control is desired. The formulations may contain as little as 0.1%, 0.2% or 0.5% to as much as 95% or more by weight of active ingredient, e.g. insect TRPV inhibitor.

[0199] “Dusts” are free flowing admixtures of the active ingredient with finely divided solids such as talc, natural clays, kieselguhr, flours such as walnut shell and cottonseed flours, and other organic and inorganic solids which act as dispersants and carriers for the toxicant; these finely divided solids have an average particle size of less than about 50 microns. A typical dust formulation useful herein is one containing 90 parts, 80 parts, 70 parts, 60 parts, 50 parts, 40 parts, 30 parts, 20 parts, preferably 10 parts, or less of the active ingredient, e.g., insect TRPV modulator or insect TRPA modulator. In one embodiment, the dust formulation may include 1 part or less of the active ingredient and 99 parts or more of talc.

[0200] Wettable powders, useful as formulations, are in the form of finely divided particles that disperse readily in water or another dispersant. The wettable powder is ultimately applied to the locus where insect control is needed either as a dry dust or as an emulsion in water or other liquid. Typical carriers for wettable powders include Fuller’s earth, kaolin clays, silicas, and other highly absorbent, readily wet inorganic diluents. Wettable powders typically are prepared to contain about 5-80% of active ingredient, depending on the absorbency of the carrier, and usually also contain a small amount of a wetting, dispersing or emulsifying agent to facilitate dispersion. For example, a useful wettable powder formulation contains 80.0 parts of the active ingredient, 17.9 parts of Palmetto clay, and 1.0 part of sodium lignosulfonate and 0.3 part of sulfonated aliphatic polyester as wetting agents. Additional wetting agent and/or oil may be added to a tank mix for to facilitate dispersion on the foliage of the plant.

[0201] Other useful formulations are emulsifiable concentrates (ECs) which are homogeneous liquid compositions dispersible in water or other dispersant, and may consist entirely of the active ingredient, and a liquid or solid emulsifying agent, or may also contain a liquid carrier, such as xylene, heavy aromatic naphthas, isophorone, or other non-volatile organic solvents. For insecticidal application these concentrates are dispersed in water or other liquid carrier and normally applied as a spray to the area to be treated. The percentage by weight of the essential active ingredient may vary according to the manner in which the composition is to be applied, but in general comprises 0.5 to 95% of active ingredient by weight of the insecticidal composition.

[0202] Flowable formulations are similar to ECs, except that the active ingredient is suspended in a liquid carrier, generally water. Flowables, like ECs, may include a small amount of a surfactant, and will typically contain active ingredients in the range of 0.5 to 95%, frequently from 10 to 50%, by weight of the composition. For insecticidal application, flowables may be diluted in water or other liquid vehicle, and are typically applied as a spray.

[0203] Typical wetting, dispersing or emulsifying agents used in agricultural and/or horticultural formulations may include, but are not limited to, the alkyl and alkylaryl sulfonates and sulfates and their sodium salts; alkylaryl polyether alcohols; sulfated higher alcohols; polyethylene oxides; sulfonated animal and vegetable oils; sulfonated petroleum oils; fatty acid esters of polyhydric alcohols and the ethylene oxide addition products of such esters; and the addition product of long-chain mercaptans and ethylene oxide. Many other types of useful surface-active agents are available in commerce. Surface-active agents, when used, typically include 1 to 15% by weight of the composition.

[0204] Other useful formulations include suspensions of the active ingredient in a relatively non-volatile solvent such as water, corn oil, kerosene, propylene glycol, or other suitable solvents.

[0205] In certain embodiments, formulations for insecticidal applications may include simple solutions of the active ingredient in a solvent, in which it is completely soluble at the desired concentration, such as acetone, alkylated naphthalenes, xylene, or other organic solvents.

[0206] Granular formulations, wherein the active ingredient is carried on relative coarse particles, are of particular utility for aerial distribution or for penetration of cover crop canopy. Pressurized sprays, typically aerosols wherein the active ingredient is dispersed in finely divided form as a result of vaporization of a low-boiling dispersant solvent carrier may also be used. Water-soluble or water-dispersible granules are free flowing, non-dusty, and readily water-soluble or water-miscible. In use by the farmer on the field, the granular formulations, emulsifiable concentrates, flowable concentrates, aqueous emulsions, solutions, etc., may be diluted with water to give a concentration of active ingredient in the range of say 0.1% or 0.2% to 1.5% or 2%.

[0207] By far the most frequently used are water-miscible formulations for mixing with water then applying as sprays. Water miscible, older formulations include: emulsifiable concentrate, wettable powder, soluble (liquid) concentrate, and soluble powder. Newer, non-powdery formulations with reduced or no hazardous solvents and improved stability include: suspension concentrate, capsule suspensions, and water dispersible granules. Such formulations are preferably solutions and suspension, e.g., aqueous suspension and solutions, ethanolic suspension and solutions, aqueous/ethanolic suspension and solutions, saline solutions, and colloidal suspensions.

[0208] Alternatively, a sprayable wax emulsion formulation may be used. The formulation contains the active ingredient, in an amount from about 0.01% to 75% by weight. The aqueous wax emulsions are broadly described in U.S. Pat. No. 6,001,346, which is hereby incorporated by reference in its entirety. The TRPV and/or TRPA modulators of the methods described herein can have a viscosity appropriate for use in aerial or backpack spray applications.

[0209] The biodegradable wax carrier comprises at least about 10% by weight of the formulation. The biodegradable wax carrier is selected from the group consisting of paraffin, beeswax, vegetable based waxes such as soywax (soybean based), and hydrocarbon based waxes such as Gulf Wax Household Paraffin Wax; paraffin wax, avg. m.p. 53C (hexacosane), high molecular weight hydrocarbons), carnauba wax, lanolin, shellac wax, bayberry wax, sugar cane wax, microcrystalline, ozocerite, ceresin, montan, candelilla wax, and combinations thereof.

[0210] Formulations may also contain an emulsifier in an amount from about 1% to about 10% by weight. Suitable emulsifiers include lecithin and modified lecithins, mono- and diglycerides, sorbitan monopalmitate, sorbitan monooleate, sorbitan monolaurate, polyoxyethylene-sorbitan monooleate, fatty acids, lipids, etc. The emulsifiers provide or improve emulsification properties of the composition. The emulsifier can be selected from many products which are well known in the art, including, but not limited to, sorbitan monolaurate (anhydrosorbitol stearate, molecular formula C₂₄H₄₆O₆), ARLACEL 60, ARMOTAN MS, CRILL 3, CRILL K3, DREWSORB 60, DURTAN 60, EMSORB 2505, GLYCOMUL S, HODAG SMS, IONET S 60, LIPOSORB S, LIPOSORB S-20, MONTANE 60, MS 33, MS33F, NEWCOL 60, NIKKOL SS 30, NISSAN NONION SP 60, NONION SP 60, NONION SP 60R, RIKEMAL S 250, sorbitan c, sorbitan stearate, SORBON 60, SORGEN 50, SPAN 55, AND SPAN 60; other sorbitan fatty acid ester that may be used include sorbitan monopalmitate, sorbitan monostearate, sorbitan tristearate, sorbitan monooleate, sorbitan sesquioleate, sorbitan trioleate, sorbitan monooleate, sorbitan trioleate.

[0211] In certain embodiments, formulations can include a phagostimulant, such as corn oil, molasses, glycerol, or corn syrup, proteinaceous material (protein or hydrolyzed protein), sugars like sucrose, or food-based ingredients such as trimethylamine, putrescine, bacterial or yeast volatiles or metabolites, ammonium acetate, ammonium carbonate or other ammonia-emitting compounds. Acetic acid vapor can be provided by compounds that produce volatilized acetic acid, for example, aqueous acetic acid, glacial acetic acid, glacial (concentrated) acetic acid, or ammonium producing compounds such as but not restricted to ammonium hydroxide, ammonium carbonate, ammonium bicarbonate, ammonium acetate, etc.

[0212] In certain embodiments, the active ingredient may be formulated and/or applied with one or more second compounds. For example, various combinations of TRPV modulators and /or TRPA modulators may be used to obtain greater advantage. For example, both a TRPV modulator and TRPAmodulator may be applied at the same time. As such in one embodiment, a formulation described herein may include both, a TRPV modulator and a TRPA modulator. In one embodiment, two or more active agents may be formulated together. In alternative embodiment, two or more active agents formulated together are all either TRPA modulators or are all TRPV modulators. Such combinations may provide certain advantages, such as, without limitation, exhibiting synergistic effects for greater control of insects or non-insect pests, reducing rates of application thereby minimizing any impact to the environment and to worker safety, controlling a broader spectrum of insects and non-insect pests, and improving tolerance by non-pest species, such as mammals and fish. Other second compounds include, without limitation, insecticides, pesticides, plant growth regulators, fertilizers, soil conditioners, or other agricultural and horticultural chemicals. The formulation may include such second compounds in an amount from about 0.002% to about 25% by weight of the composition.

[0213] In certain embodiments, the formulations of the present invention may contain visual attractants, e.g. food coloring.

[0214] A variety of additives may also be incorporated into the formulation. These additives typically change and/or enhance the physical characteristics of the carrier material and are, therefore, suitable for designing compositions having specific requirements as to the release rate and amount of the active ingredient, protection of the wax composition from weather conditions, etc. These additives are, among others, plasticizers, volatility suppressants, antioxidants, lipids, various ultraviolet blockers and absorbers, or antimicrobials, typically added in amounts from about 0.001% to about 10%, more typically between 1-6%, by weight.

[0215] Plasticizers, such as glycerin or soy oil affect physical properties of the composition and may extend its resistance to environmental destruction.

[0216] Antioxidants, such as vitamin E, BHA (butylated hydroxyanisole), BHT (butylated hydroxytoluene), and other antioxidants which protect the bioactive agent from degradation, may be added in amounts from about 0.1% to about 3%, by weight.

[0217] Ultraviolet blockers, such as beta-carotene, lignin or p-aminobenzoic acid protect the bioactive agents from light degradation may be added in amounts from about 1% to about 3%, by weight.

[0218] Antimicrobials, such as potassium sorbate, nitrates, nitrites, and propylene oxide, protect the bioactive agents from microbial destruction may be added in amounts from 0.1% to about 2% by weight.

[0219] Adjuvants can also be added to the formulation. An “adjuvant” is broadly defined as any substance added to the spray tank, separate from the insecticide formulation that will improve the performance of the insecticide. These may include, but are not limited to: wetter-spreaders, stickers, penetrants, compatibility agents, buffers, and so on.

[0220] Other compounds and materials may also be added provided they do not substantially interfere with the activity of active ingredient. Whether or not an additive substantially interferes with the active ingredient’s activity can be determined by standard test formats, involving direct comparisons of efficacy of the composition of the active ingredient without an added compound and the composition of the active ingredient with an added compound.

[0221] It was discovered that an insect will stop eating after ingesting a TRPV channel activating compound. For example, ingesting a TRPV and/or TRPA ion channel agonist can cause an insect to stop eating. Thus, in one embodiment, the compounds may be formulated with a food source for insects, e.g., formulated with compounds in insect diet. In another embodiment, the compounds may be formulated with sucrose. Without wishing to be bound by theory, the insect will feed on such mixtures and stop eating.

[0222] In certain embodiments, the active agent may be applied to feeding locus of insects. This inhibits insect feeding leading to starvation of insects. In one embodiment, the active agent is applied as a spray to locus of insects, e.g., feeding locus. The active agent may be applied to the insect and/or pest (mollusk, nematode and/or arthropod) feeding source, used in bait or traps, and or directly applied to the pest itself.

[0223] In one embodiment, the active agent may be applied to insect traps. For example, the trap may be coated with the active agent or trap may be loaded with insect food comprising an active agent.

[0224] The nucleic acid sequences of Nanchung and Water witch subunits of the TRP channels as well as the corresponding amino acid sequences, their origins, accession numbers (if available) and host organism codes are summarized in Table 1 below. Upon co-expression of the Nanchung and Water witch proteins in a cell, a functional TRP channel may be formed.

TABLE 1

| SEQ ID NO. | DESCRIPTION | ORGANISM | ACCESSION NO. | CODE |
|---|---|---|---|---|
| 1 | Nanchung DNA | Aedes aegypti | XM_001652374.2 | Aaeg |
| 2 | Nanchung DNA | Culex quinquefasciatus | XM_001847084.1 | Cqui |
| 3 | Nanchung DNA | Anopheles darlingi | In-house | Adar |
| 4 | Nanchung DNA | Anopheles gambiae | XM_320300.4 | Agam |
| 5 | Nanchung DNA | Ceratitis capitata | XM_004537685.2 | Ccap |
| 6 | Nanchung DNA | Musca domestica | XM_005180432 | Mdom |
| 7 | Nanchung DNA | Drosophila melanogaster | NM_140439.3 | Dmel |
| 8 | Nanchung DNA | Acromyrmex echinatior | In-house | Aech |
| 9 | Nanchung DNA | Solenopsis invicta | XM_011167328.2 | Sinv |
| 10 | Nanchung DNA | Camponotus floridanus | GL440604.1 | Cflo |
| 11 | Nanchung DNA | Harpegnathos saltator | GL450384.1 | Hsal |
| 12 | Nanchung DNA | Apis florea | XM_003689958.2 | Aflo |
| 13 | Nanchung DNA | Apis mellifera | XM_625167.6 | Amel |
| 14 | Nanchung DNA | Megachile rotundata | XM_003706124.2 | Mrot |
| 15 | Nanchung DNA | Nasonia vitripennis | XM_001606052.4 | Nvit |
| 16 | Nanchung DNA | Dendroctonus ponderosae | In-house | Dpon |
| 17 | Nanchung DNA | Tribolium castaneum | XM_962803.3 | Tcas |
| 18 | Nanchung DNA | Nilaparvata lugens | MF684871.1 | Nlug |
| 19 | Nanchung DNA | Acyrthosiphon pisum | XM_016802803.1 | Apis |
| 20 | Nanchung DNA | Myzus persicae | XM_022324691.1 | Mper |
| 21 | Nanchung DNA | Bemisia tabaci | XM_019045280.1 | Btab |
| 22 | Nanchung DNA | Halyomorpha halys | XM_014421401.2 | Hhal |
| 23 | Nanchung DNA | Euschistus heros | In-house | Eher |
| 24 | Nanchung DNA | Pediculus humanus corporis | XM_002427918.1 | Phum |
| 25 | Nanchung DNA | Bombyx mori | XM_021353316.1 | Bmor |
| 26 | Nanchung DNA | Vanessa tameamea | XM_026628835.1 | Vtam |
| 27 | Nanchung DNA | Danaus plexippus | In-house | Dple |
| 28 | Water witch DNA | Acromyrmex echinatior | In-house | Aech |
| 29 | Water witch DNA | Apis florea | XM_003691355.2 | Aflo |
| 30 | Water witch DNA | Apis mellifera | XM_026439154.1 | Amel |
| 31 | Water witch DNA | Bombus terrestris | XM_012315059.2 | Bter |
| 32 | Water witch DNA | Nasonia vitripennis | XM_008212470.2 | Nvit |
| 33 | Water witch DNA | Cimex lectularius | XM_014387113.2 | Clec |
| 34 | Water witch DNA | Halyomorpha halys | XM_014427168.2 | Hhal |
| 35 | Water witch DNA | Nezara viridula | In-house | Nvir |
| 36 | Water witch DNA | Nilaparvata lugens | XM_022345460.1 | Nlug |
| 37 | Water witch DNA | Acyrthosiphon pisum | XM_016802413.1 | Apis |
| 38 | Water witch DNA | Myzus persicae | XM_022315379.1 | Mper |
| 39 | Water witch DNA | Diaphorina citri | XM_026824678.1 | Dcit |
| 40 | Water witch DNA | Pediculus humanus corporis | XM_002430593.1 | Phum |
| 41 | Water witch DNA | Dendroctonus ponderosae | XM_019911745.1 | Dpon |
| 42 | Water witch DNA | Leptinotarsa decemlineata | XM_023164353.1 | Ldec |
| 43 | Water witch DNA | Tribolium castaneum | XM_961536.3 | Tcas |
| 44 | Water witch DNA | Plutella xylostella | XM_011556111.1 | Pxyl |
| 45 | Water witch DNA | Trichoplusia ni | XM_026879699.1 | Trni |
| 46 | Water witch DNA | Amyelois transitella | XM_013330567.1 | Atra |
| 47 | Water witch DNA | Helicoverpa armigera | XM_021338514.1 | Harm |
| 48 | Water witch DNA | Spodoptera littoralis | XM_022959442.1 | Slit |
| 49 | Water witch DNA | Papilio xuthus | XM_013310920.1 | Pxut |
| 50 | Water witch DNA | Papilio machaon | XM_014508830.1 | Pmac |
| 51 | Water witch DNA | Vanessa tameamea | XM_026627409.1 | Vtam |
| 52 | Water witch DNA | Bombyx mori | NM_001309607.1 | Bmor |
| 53 | Water witch DNA | Anopheles gambiae | XM_319460.3 | Agam2 |
| 54 | Water witch DNA | Aedes aegypti | XM_021853484.1 | Aaeg |
| 55 | Water witch DNA | Culex quinquefasciatus | XM_001851266.1 | Cqui |
| 56 | Water witch DNA | Anopheles gambiae | XM_310750.5 | Agam1 |
| 57 | Water witch DNA | Lucilia cuprina | XM_023444358.1 | Lcup |
| 58 | Water witch DNA | Musca domestica | XM_005183066.3 | Mdom |
| 59 | Water witch DNA | Stomoxys calcitrans | XM_013253516.1 | Scal |
| 60 | Water witch DNA | Bactrocera dorsalis | XM_011200137.2 | Bdor |
| 61 | Water witch DNA | Zeugodacus cucurbitae | XM_011186538.1 | Zcuc |
| 62 | Water witch DNA | Ceratitis capitata | XM_012303232.2 | Ccap |
| 63 | Water witch DNA | Drosophila melanogaster | NM_169200.2 | Dmel |
| 64 | Nanchung PROT | Aedes aegypti | XP_001652424.1 | Aaeg |
| 65 | Nanchung PROT | Culex quinquefasciatus | XP_001847136.1 | Cqui |
| 66 | Nanchung PROT | Anopheles darlingi | In-house | Adar |
| 67 | Nanchung PROT | Anopheles gambiae | XP_320300.4 | Agam |
| 68 | Nanchung PROT | Ceratitis capitata | XP_004537742.1 | Ccap |
| 69 | Nanchung PROT | Musca domestica | XP_005180489.1 | Mdom |
| 70 | Nanchung PROT | Drosophila melanogaster | NP_648696.2 | Dmel |
| 71 | Nanchung PROT | Acromyrmex echinatior | In-house | Aech |
| 72 | Nanchung PROT | Solenopsis invicta | XP_011165630.1 | Sinv |
| 73 | Nanchung PROT | Camponotus floridanus | EFN65752.1 | Cflo |
| 74 | Nanchung PROT | Harpegnathos saltator | EFN81068.1 | Hsal |
| 75 | Nanchung PROT | Apis florea | XP_003690006.1 | Aflo |
| 76 | Nanchung PROT | Apis mellifera | XP_625170.3 | Amel |
| 77 | Nanchung PROT | Megachile rotundata | XP_003706172.1 | Mrot |
| 78 | Nanchung PROT | Nasonia vitripennis | XP_001606102.2 | Nvit |
| 79 | Nanchung PROT | Dendroctonus ponderosae | In-house | Dpon |
| 80 | Nanchung PROT | Tribolium castaneum | XP_967896.1 | Tcas |
| 81 | Nanchung PROT | Nilaparvata lugens | ATU07272.1 | Nlug |
| 82 | Nanchung PROT | Acyrthosiphon pisum | XP_016658292.1 | Apis |
| 83 | Nanchung PROT | Myzus persicae | XP_022180383.1 | Mper |
| 84 | Nanchung PROT | Bemisia tabaci | XP_018900825.1 | Btab |
| 85 | Nanchung PROT | Halyomorpha halys | XP_014276887.1 | Hhal |
| 86 | Nanchung PROT | Euschistus heros | In-house | Eher |
| 87 | Nanchung PROT | Pediculus humanus corporis | XP_002427963.1 | Phum |
| 88 | Nanchung PROT | Bombyx mori | XP_021208991.1 | Bmor |
| 89 | Nanchung PROT | Vanessa tameamea | XP_026484620.1 | Vtam |
| 90 | Nanchung PROT | Danaus plexippus | In-house | Dple |
| 91 | Water witch PROT | Acromyrmex echinatior | In-house | Aech |
| 92 | Water witch PROT | Apis florea | XP_003691403.1 | Aflo |
| 93 | Water witch PROT | Apis mellifera | XP_026294939.1 | Amel |
| 94 | Water witch PROT | Bombus terrestris | XP_012170449.1 | Bter |
| 95 | Water witch PROT | Nasonia vitripennis | XP_008210692.1 | Nvit |
| 96 | Water witch PROT | Cimex lectularius | XP_014242599.1 | Clec |
| 97 | Water witch PROT | Halyomorpha halys | XP_014282654.1 | Hhal |
| 98 | Water witch PROT | Nezara viridula | In-house | Nvir |
| 99 | Water witch PROT | Nilaparvata lugens | XP_022201152.1 | Nlug |
| 100 | Water witch PROT | Acyrthosiphon pisum | XP_016657902.1 | Apis |
| 101 | Water witch PROT | Myzus persicae | XP_022171071.1 | Mper |
| 102 | Water witch PROT | Diaphorina citri | XP_026680479.1 | Dcit |
| 103 | Water witch PROT | Pediculus humanus corporis | XP_002430638.1 | Phum |
| 104 | Water witch PROT | Dendroctonus ponderosae | XP_019767304.1 | Dpon |
| 105 | Water witch PROT | Leptinotarsa decemlineata | XP_023020121.1 | Ldec |
| 106 | Water witch PROT | Tribolium castaneum | XP_966629.2 | Tcas |
| 107 | Water witch PROT | Plutella xylostella | XP_011554413.1 | Pxyl |
| 108 | Water witch PROT | Trichoplusia ni | XP_026735500.1 | Trni |
| 109 | Water witch PROT | Amyelois transitella | XP_013186021.1 | Atra |
| 110 | Water witch PROT | Helicoverpa armigera | XP_021194189.1 | Harm |
| 111 | Water witch PROT | Spodoptera littoralis | XP_022815210.1 | Slit |
| 112 | Water witch PROT | Papilio Xuthus | XP_013166374.1 | Pxut |
| 113 | Water witch PROT | Papilio machaon | XP_014364316.1 | Pmac |
| 114 | Water witch PROT | Vanessa tameamea | XP_026483194.1 | Vtam |
| 115 | Water witch PROT | Bombyx mori | NP_001296536.1 | Bmor |
| 116 | Water witch PROT | Anopheles gambiae | XP_319460.3 | Agam2 |
| 117 | Water witch PROT | Aedes aegypti | XP_021709176.1 | Aaeg |
| 118 | Water witch PROT | Culex quinquefasciatus | XP_001851318.1 | Cqui |
| 119 | Water witch PROT | Anopheles gambiae | XP_310750.5 | Agam1 |
| 120 | Water witch PROT | Lucilia cuprina | XP_023300126.1 | Lcup |
| 121 | Water witch PROT | Musca domestica | XP_005183123.1 | Mdom |
| 122 | Water witch PROT | Stomoxys calcitrans | XP_013108970.1 | Scal |
| 123 | Water witch PROT | Bactrocera dorsalis | XP_011198439.1 | Bdor |
| 124 | Water witch PROT | Zeugodacus cucurbitae | XP_011184840.1 | Zcuc |
| 125 | Water witch PROT | Ceratitis capitate | XP_012158622.1 | Ccap |
| 126 | Water witch PROT | Drosophila melanogaster | NP_731193.1 | Dmel |

Note: In-house sequences were generated through public and proprietary sequence curation.

[0225] Adenovirions, which include the adenovirus expression vectors of the present invention, can be produced using the following methodology. Adenovirons may be used to generate cells used to express the proteins of interest, for example, Nanchung, and/or Water witch proteins.

[0226] The methods of creating an adenovirus generally involves the steps of introducing the vector containing the gene of interest (e.g., Nanchung or Water witch) into a producer cell. The vector containing the gene of interest may be introduced into the producer cell using standard transfection techniques known to one of skill in the art (Zoltukhin et al., Gene Therapy, 6:973-985, 1999). The adenovirus produced by producer cells (packaging cells) are used to transduce a cell of interest. The cell of interest produces the desired proteins.

[0227] Preferably, the adenovirions are added to the cells at the appropriate multiplicity of infection according to standard transduction methods appropriate for the particular target cells. Titers of adenovirions to administer can vary, depending upon the target cell type and the particular viral vector, and may be determined by those of skill in the art without undue experimentation.

[0228] The cell line may be an insect cell line, such as Sf9 (ATCC# CRL-1711) or Schneider 2 (S2) cells (Life Technologies, #R690-07) (if needed, to introduce a gene of interest into an insect cell transfection techniques may be used among others), African clawed frog (Xenopus laevis) oocytes (to introduce a gene of interest injection techniques may be used), or a mammalian cell line, such as mouse, hamster, human cell line, (to introduce a gene of interest into a mammalian cell several techniques may be used, including but not limited to transfection, adenoviruses, retroviruses, and/or electroporation, etc...) or any other cell line that does not normally expresses Nanchung and Water witch proteins. One example of a mammalian cell line suitable for use with the vector expression system of the present invention includes Chinese hamster ovary (CHO-K1) cells (ATCC# CCL-61).

[0229] In some embodiments, a cell expressing a recombinant nucleic acid sequence encoding a TRPV and/or TRPA channel is a cell that has been transformed with an expression vector comprising a nucleotide sequence encoding an insect TRPV and/or TRPA channel such as, but not limited to the TRP channel proteins discloses herein. Methods for transforming cells that would be known to one of ordinary skill in the art include, but are not limited to, infection using viral vectors, lipofection, electroporation, particle bombardment, and transfection. Detailed procedures for representative methods can be found in Sambrook & Russell, 2001 and references cited therein. Useful expression vectors and methods of introducing such vectors into cells or expression of the encoded polypeptide are also known to one of ordinary skill in the art. For example, a plasmid expression vector can be introduced into a cell by calcium-phosphate mediated transfection, DEAE-Dextran-mediated transfection, lipofection, polybrene- or polylysine-mediated transfection, electroporation, or by conjugation to an antibody, gramicidin S, artificial viral envelopes, or other intracellular carriers. A viral expression vector can be introduced into a cell in an expressible form by infection or transduction, for example, or by encapsulation in a liposome.

[0230] When a cell expressing a recombinant nucleic acid sequence encoding an insect TRPV and/or TRPA channel gene product has been produced, these cells can then be employed in testing candidate compounds for an ability to modulate ion transport in the cell through the TRPA and/or TRPV channel. The exemplary methods for testing ion transport in the cells were described above as well as presented in the Examples sections below. Other applicable methods would be known to those of skill in the art upon consideration of this disclosure.

### EXAMPLES

[0231] The following Examples provide illustrative embodiments. In light of the present disclosure and the general level of skill in the art, those of skill will appreciate that the following Examples are intended to be exemplary only and that numerous changes, modifications, and alterations can be employed without departing from the scope of the presently disclosed subject matter.

### Example I: Adenovirus Expression Constructs

[0232] To test biological activity and ligand binding properties of TRP channels, Drosophila melanogaster Nanchung, Inactive and Water witch proteins were expressed in hamster CHO-K1 cells either alone or in combinations. To trace expression of the TRP channels they were fused with fluorescent proteins, AcGFP and mCherry, as well as antibody epitope tags HA and FLAG, as illustrated in FIG. 1. DNAs encoding for tagged TRP channels were delivered into CHO-K1 cells using adenoviruses. Adenovirus-mediated gene delivery allowed for expression of the gene of interest, optimize expression levels and stoichiometry of subunits, as well as prevention of possible toxic effects of insect TRP channels by maintaining virus-infected cells at room temperature.

[0233] To prevent toxicity of TRP channels during adenovirus packaging stage, adenoviral constructs containing Tet repressor binding site within modified CMV promoter were used (FIG. 1). The presence of Tet repressor binding sites inhibits expression of the genes of interest in adenovirus packaging cells producing Tet repressor.

### Example II: Activation of TRP Channels by Afidopyropen and Pymetrozine

[0234] It has previously been shown that commercial insecticides afidopyropen (AP) and pymetrozine (PM) hyperactivate activate and eventually silence complexes consisting of Nanchung (Nan) and Inactive (Iav). Nanchung and Inactive are present in insect chordotonal organs, mechanosensors involved in insect body coordination, as well as sensing sound and gravity (Kavlie and Albert, 2013). Nanchung was shown to be a direct target of the insecticides, whereas Inactive was required for biological activity and high affinity ligand binding (Kandasamy et al., 2017).

[0235] TRPA channel Water witch (Water witch) is also present in chordotonal organs, and point mutation within conservative region of Water witch, which is presumably involved in ion conductivity, produced effects, which resmemble the effects of AP or PM (Senthilan et al., 2012). To test the hypothesis that Water witch may also be involved in the action of PM and AP, Water witch was expressed in CHO-K1 cells either alone or in combination with Nanchung. Given that TRP channels are permeable for Ca2+, cell responces were measured by monitoring Ca2+ mobilization using Ca2+ sensitive fluorescent probe FLUO4.

[0236] As shown on FIG. 2, both PM and AP elicited calcium mobilization in the cells, co-expressing Nanchung and Water witch (FIG. 2B), but not cells expressing Water witch individually (FIG. 2A). It has been previously shown that Nanchung alone does not respond to stimulation by AP or PM, and required co-expression of Inactive for biological activity. The effect of Water witch co-expression with Nanchung shown on FIG. 2 is, therefore, analogous to the effect of Inactive co-expression with Nanchung.

[0237] Notheworthy, two other insecticidal compounds, flonicamid (FL), and TFNA-AM, which also act on chordotonal organs, but do not modulate insect TRPV channels were without effect.

### Example III: Nanchung and Water Witch Assemple Into Nanchung:Water Witch Complexes.

[0238] The observation that calcium mobilization elicited by AP and PM required co-expression of Nanchung and Water witch suggested that these two proteins may assemble into Nanchung:Water witch complexes. To test this hypothesis, Nanchung and Water witch were fused with different antibody epitope tags. As depicted by FIG. 3, HA-tagged Nanchung co-immunoprecipitated with FLAG-tagged Water witch, analogous to previously reported association of Nanchung with Inactive.

### Example IV: Nanchung-Water Witch Complexes Are Activated by the Endogenous Agonist, Nicotinamide.

[0239] Nicotinamide, a form of vitamin B3, has been shown to activate both insect and nematode Nanchung and Inactive (Upadhyay et al., 2016). The stimulatory effects of nicotinamide required simultaneous expression of Nanchung and Inactive. To test whether nicotinamide can also activate Nanchung:Water witch complexes, Nanchung, Inactive and Water witch were expressed in CHO-K1 cells either individually, or in combinations. As shown on FIG. 4A, nicotinamide evoked Ca2+ response in cells co-expressing Nanchung and Water witch, and cells co-expressing Nanchung and Inactive, but not in the cells expressing these proteins individually. Furthemore, nicotinamide activated Nanchung:Inactive and Nancung: Water witch complexes with nearly identical potency and efficacy (FIG. 4B). As such, Nanchung:Water witch complexes can be activated by the same endogenous and exogenous modulators, which activate Nanchung:Inactive complexes.

### Example V: Co-expression of Nanchung With Water Witch Facilitates Binding Of Afidopyropen to Nanchung.

[0240] As depicted by FIG. 5A, specific binding of tritium-labeled afidopyropen to membranes prepared from CHO-K1 cells expressing Nanchung individually revealed the presence of a binding site with a relatively moderate affinity (K_{d} = 4.5 nM). Co-expression of Nanchung and Water witch increased binding affinity ca. 100-fold (Kd = 0.048 nM). Scatchard transformation of binding isotherms (FIG. 5B) further illustrates appearance of high affinity binding sites upon co-expression of Water witch with Nanchung. Binding of tritiated AP to membranes expressing Water witch alone was negligible. As such, analogous to previously reported increase of binding affinity upon co-expression of Nanchung and Inactive (Kandasamy et al., 2017), co-expression of Nanchung and Water witch dramatically facilitates binding of afidopyropen.

### Example VI: Pymetrozine and Nicotinamide Compete With Afidopyropen for Binding

[0241] As depicted by FIG. 6, both pymetrozine (FIG. 6A) and nicotinamide (FIG. 6B) completely inhibited binding of tritiated afidopyropen to membranes prepared from cells co expressing Nanchung and Inactive, as well as cells co-expressing Nanchung and Water witch. These data indicate that afidopyropen, pymetrozine and nicotinamide have overlapping binding sites and suggest that agonist binding pockets in Nanchung-Inactive complex and Water witch-Inactive complex may be structurally similar.

### Example VII: Water Witch Forms a Functional Channel Activated by Plant-Derived Deterrents.

[0242] Biological activity of plant-derived deterrents and/or repellents allyl isothiocyanate and cinnamaldehyde has been attributed exclusively to activation of the insect TRPA1 channel. Based on amino acid sequence analysis, it has been determined that TRPA1 and Water witch proteins belong the different clades, TRPA1 clade and basal TRPA clade, respectively. Unlike TRPA1 clade, the members of the basal TRPA clade were predicted to be inefficient in detection of electrophilic compounds, which include allyl isothiocyanate and cinnamaldehyde (Kang et al., 2010). The inventors have found, however, that both individually expressed Water witch and Water witch co-expressed with Nanchung can be efficiently activated by allyl isothiocyanate and cinnamaldehyde (FIG. 7). Nanchung:Inactive complexes were not responsive to these compounds. This finding identifies Water witch protein as a new and alternative target for plant-derived deterrents and repellents, suggesting that assys which utilize heterologously expressed Water witch can be used for discovery of new compounds with deterrent and/or repellent properties.

### Example 8. Water Witch and Inactive Have Limited Similarity

[0243] Inactive and Water witch proteins belong to different subfamilies: TRPV and TRPA subfamilies respectively. Furthemore, amino acid alignment (FIG. 8) revealed that Drosopila melanogaster Inactive and Water witch proteins have only ca. 22% identity. Yet, the inventors demonstrated that Water witch protein is as capable of assembling with Nanchung protein, confer responses to agonists and facilitate afidopyropen binding as Inactive protein (Kandasamy et al., 2017; Nesterov et al., 2015). Given that Nanchung:Inactive and Nanchung:Water witch complexes interact with endogenous and exogenous agonists with nearly identical potencies, efficacies and affinities suggests that ligand binding pocket may be located entirely within Nanchung protein, whereas Water witch or Inactive act like chaperons to facilitate folding of Nanchung and/or change its conformation. This, in turn, raises the possibility that any other TRP channel capable of forming complex with Nanchung may act in similar fashion.

[0244] In summary, using the combination of functional and binding assays in the examples above, the inventors demonstrated the following: i) the insect proteins Nanchung and Water witch are capable of assembling into complex; ii) Nanchung-Water witch complex is a direct target of commercial insecticides afidopyropen and pymetrozine, as well as endogenous agonist nicotinamide; iii) afidopyropen, pymetrozine and nicotinamide have overlapping binding sites; iv) Nanchung protein forms the main binding interface for afidopyropen, whereas presence of Water witch protein increases binding affinity; v) Water witch protein is a direct target of plant-derived insecticides and repellents; vi) new methods were developed which can be used for identifying candidate compounds which act by directly targeting insect Water witch protein, or Nanchung-Water witch complexes and which may be used as insecticides or repellents.

### Materials and Methods

### Compounds

[0245] Pymetrozine was obtained from Sigma, flonicamid was purchased from ChemService Inc., (West Chester, PA) and TFNA-AM (4-trifluoronicotinamide) was obtained from ABCR Gmbh (Karlsruhe, Germany). Afidopyropen was synthesized at BASF. Tritium labeled Afidopyropen (19 Ci/mmol) was custom-made by RC TRITEC AG (Teufen, Germany).

### Heterologous Expression of Nanchung, Inactive and Water Witch

[0246] To produce expression constructs, complementary DNAs encoding for Drosophila melanogaster Water witch, (SEQ ID NO 63) and Inactive (NP_572353) were fused in-frame with FLAG tags and AcGFP fluorescent protein at carboxyl termini (FIG. 1). Complementary DNA encoding for Drosophila melanogaster Nanchung, (SEQ ID NO 7) was fused in-frame with HA tags and mCherry fluorescent protein at its carboxyl terminus (FIG. 1). The complimentary DNAs were codon-optimized for expression in mammalian cells.

[0247] To produce adenoviruses, complimentary DNAs encoding epitope-tagged TRP channels were subcloned into the adenovirus shuttle vector pENTCMV1-TetO (Welgen Inc., Worceter, MA). and ligated to a pAdREP plasmid (Welgen), which contains the remaining of the adenovirus genome. The pENTCMV1-TetO vector contains two Tet repressor binding sites within a modified CMV promoter, which repress transcription of the gene of interest in cells expressing the Tet repressor (FIG. 1). The recombination products were transformed into Escherichia coli cells, positive clones were selected, and the cosmid DNAs were isolated. The cosmid DNAs were transfected into HEK293-TetR cells, which produce the Tet repressor (Postle et al., 1984) preventing expression of TRP channels by the adenovirus packaging cells. Adenoviruses were purified from large-scale cultures and viral titers were calculated as viral particles/ml = Absorption at 260 nm x 1.1x 10¹⁴.

### Calcium Imaging

[0248] Hamster CHO-K1 cells (ATCC ® CCL-61TM) were infected with adenoviruses expressing TRP channels individually or in combinations. The cells were kept overnight at 37° C., followed by 3 days at 25° C. The medium was changed two days after seeding. Calcium mobilization was detected using fluorescent calcium probe fluo-4AM (Life Technologies) and measured by FLIPR-TETRA instrument (Molecular Devices, Sunnyvale, CA). The cells were loaded with 50 µl of Hank’s buffered salt solution (HBSS) containing 4 µM fluo-4AM, 5 mM probenecid, 20 mM CaCl₂, and 0.02% pluoronic for 2 hours at 25° C. The dye was then discarded, 50 µl of HBSS were added. The test compounds were dissolved in DMSO and added to the cells in 50 µl HBSS, yielding a final DMSO concentration of 0.2%. Fluorescence was monitored for 10 minutes at 1 second intervals at 470-495 nm/515-575 nm excitation/emission wavelengths. EC₅₀ values were calculated using GraphPad Prism (GraphPad Software).

### Membrane Preparation

[0249] The adenovirus-transduced CHO-K1 cells were seeded at 10 x 10⁶ cells per T175 flask (Greiner) and kept at 37° C. 18 hrs followed by incubation at 25° C. for 72 hrs. The media was changed at 24 hrs and 72 hrs post transduction. The cells were rinsed twice with PBS, and incubated in Versene solution (Life Technologies) for 10 min at room temperature. Detached cells were pelleted at 300 × g for 10 min and resuspended in 8 mL of ice-cold 20 mM Hepes (pH 7.3) containing 1% (wt/vol) protease inhibitors mixture (Halt; Thermo Fisher). After 10 min on ice, the cells were homogenized by sonication. The samples were centrifuged at 300 × g for 10 min, and supernatants were collected and centrifuged for 2 h at 50,000 × g. Membranes were resuspended in 0.5 mL of 50 mM HEPES, 100 mM NaCl, 1 mM CaCl₂, 5 mM MgCl₂, pH 7.4, and stored at -80° C. Protein content was determined using the Bradford Method.

### [³H]- Afidopyropen Binding Assay

[0250] Equilibrium binding assays were performed in the binding buffer (50 mM HEPES, 100mM NaCl, 1 mM CaCl₂, 5mM MgCl₂, pH 7.4). The reactions were performed in 96-well U-bottom polypropylene plates. 100 µL membranes resuspended in the binding buffer containing Tween-20 (0.0025% final concentration in the assay), were combined with either 200 µl (saturation binding experiments), or 800 µl (ligand displacement experiments) of binding buffer containing [³H]- afidopyropen, dissolved in ethanol, and, where indicated, test compounds, dissolved in DMSO. The final concentrations of ethanol and DMSO were kept at 0.2% and 0.25% respectfully in both saturation binding and competition experiments. Typically, 60-100 µg of membranes were used per data point. Followed by 3 hours of incubation at room temperature, assay mixes were filtered through Multiscreen HTS+ 96 Hi Flow FC filters (EMD Millipore), pre-wetted with 0.1% polyethyleneimine. Filters were washed three times with 200 µl of ice-cold binding buffer, scintillation cocktail was added and radioactivity was measured using Wallac 1450 Microbeta counter. Non-specific binding was measured in the presence of 500-fold excess of unlabeled afidopyropen. Kᵢ values were calculated by Cheng-Prusoff method (Ref)

### Western Blotting and Co-Immunoprecipitation

[0251] For Western blotting, adenovirus-transduced cells were seeded on 35 mm dishes. The cells were washed with phosphate-buffered saline and lysed in 300 µl of NuPAGE LDS sample buffer (Life Technologies) supplemented with a protease inhibitor cocktail (Sigma Aldrich) and TurboDNAse (Ambion). For co-immunoprecipitation, adenovirus-transduced cells were seeded on 90-mm dishes and lysed in 50 mM HEPES, 10% glycerol, 1% Triton-X-100, 100 mM NaCl, 1 mM EDTA, and 1 mM EGTA, containing 0.5 mM PMSF and the protease inhibitor cocktail (Sigma). FLAG-tagged Water witch protein was immunoprecipitated with anti-FLAG M2 affinity gel (Sigma). The samples were electrophoresed using the NuPaGe 4-12% Bis-Tris PreCast gel system (Life Technologies). Proteins were detected using anti-FLAG M2-peroxidase antibody (Sigma), or anti-HA-biotin antibody (Covance). Blots were developed with ECL reagent (Thermo Scientific).

[0252] Nanchung and Water witch sequence alignment was performed by Clustal W. Transmembrane domains in Inactive and Water witch were assigned by homology with cryo-electron structures of rat TRPV6 and human TRPA1 respectively using Molecular Operating Environment modeling software.

[0253] It is therefore intended that the foregoing detailed description be regarded as illustrative rather than limiting, and that it be understood that it is the following claims, including all equivalents, that are intended to define the spirit and scope of this invention.

The application's sequence listing, which the Patent Office published only in electronic form, follows.

SEQUENCE LISTING (126 sequences)

SEQ ID NO: 1 - DNA, 2448 bp, Aedes aegypti
  nan-Aeag
atgggaaataccgagagcaatgtcaccagcggagtcaagaaacaggccggagtgtccacccaggctctgtacaagttcgtcaatctgaagggtggtggtcttttggtggacatgatgaaaagagcaatccaaaacaaacaatatgcagaaatagatcatgcgatcaaaacgaaagtcgaacccttcctgtacaataagggcaaagggaagtatatcccagtggcccagttggtgctgctgaggaatcgagaacgacctcgatccaagcagttgccagagattcgtgccttggaaaaccctgaagaggatttcgacattgacgcagtatgtccggacgtgaccgagggcgaataccagaggaatccatcggggtacagggaggtgtgctggaacatcaaggaacgaggagcagtcggcgaaactattcttcatctgtgcttgctgaacgcaacatctttgcatgctgatcttgccaagcgcctactacgtttctacccgaagctcatcaacgatatctacatgtgcgatgagtattacggggaaagtgtgctccacgtggcaattgtcaacgaagatccggccatggttaagtatttattggacagtggttccgatgtagacgagagatgttgcggaacgttcatgtgtccagaggaccaaaaggcaacgcgatacgattctatcgaaacggaaatcatttgcgtacttcccatgaccaactacgatgggtatgtgtattggggcgaatatccgttgagttttgccgcttgcttaggccaggaggaatgctaccggttggtgttggctcggggagctgatccagataatcaggattcgaacggaaacaccgttttgcacatgttggtcatctacgagaaaatctcaacattcgacatggcgtatgaagtcggctcatcgctggacataagaaacctgcagaatttgacgccgttgactttggcagccaagttgggtcgggttgagatgtttttccacattatgaacatcgaacgagaaatctactggcagttgggagctatcacttgtgcagcctatccgcttgctttgatcgacacgatcgacatcgaaacagggaacattaacaaagattcagcattaaatttagtggtattcggcgacaaagcggagcatttagacctactagaaggtgtactgattgatttgctcaagaccaagtggaactcgttcgtcaaagacaagttctatcgccaattcttcgtgttcttttggtatttttgcgtttcactagtaagcttcactctgagaaggggaccaatgaatttggaggagacggcagccaaccgcaccacaaccagcattactttgaaaaatttgacattttctgattcgactaacgcaacattacccactttactggctgcggatgtgaacgaaaaaatcgttcaatttattgcaaacgaaacgttattcgatccggcagttatggaagaaaacactttctttaattctaaatgtgccaccatggcatacgacacactgcaggataagataaggttggtttcggagatcatcattctcatcggatcattcttgtacctagttggagcgttgagagaatttcgattcttgggacgaaaaatgttctttgagaatttgatgatttccccttctcgagttatgtttctgttctcgtgctgcataatgatgatcgtaccgtttctgaaagtcctttgcttaatcgagcttgaggatcacgttgccgtgacgattatgttgactactgctccgtactttttgttcttctgtcgtggtttcaaaaccgttggaccgttcgttgtgatgatctaccgcatggtgatgggagacttgctgcgattcgtcgtcatctatctggtgttcgtgatgggattttcccaggcctactacattgtgttcttgtcgttcaagggtgaagaggaaggcgatgaaaacccgatgccttcgccgatggagtcgatagtggcgatgtttttgatgtcgctgacgaatttcggcgactactacggtgcactggagaaaaccgagcacgagggatgcgctaaggttcttttcgtcattttcatggttattgtggccgtcctgttggtcaacttgctcatcgccatgatgggtaacacctacaccatgattgccgaaacgaagaacgaatggcaacggcaatgggcacgaatcgttctggtagtggaacgaggagttcctccgagcgagcgactcaaaaacttcatgagctacagccaacccatgtcggacgggagacgagccctcgtgttgcgattgcatatgacggacgaagacaaggaagagatgaaggaaatcctcgagatgaaacgtgtccatgaacgcttgaagaagaaacgtcaggtggaacgagaattaagagccgagcagcgacgactaatcatggagaaatatgcaaacgtaccttga

SEQ ID NO: 2 - DNA, 2451 bp, Culex quinquefasciatus
  nan-Cqui
atgggaaataccgaaagtaacgtcaccagtggcgtcaagaagcaggccggagtgtccacccaggcactgtacaagtttgtcaacctgaaaggtggcggcctgctggtggacatgatgaagcgggcgatccaaaacaaacagtacgccgaaatagaccacgcaataaagaccaaggtggaaccgtttctgtacaacaagggcaaggggaagtacattccggtggcacagttggtgtacctaaggaaccgggaacggccacgccacaagcaactgccggaaattcgtgccctcgaaaatcccgaggaggactacgatatagacaaagagtgcccggatgtgaccgagggcgagtacatgcggaaccccggggggtacagggaggtgtgctggaacatcaaggaacgtggcgcagtaggcgagaccattttgcatttgtgccttctgaacgcaacttcactgcacgcagatctggcgaagcgcctgctgcgattctaccctaaactgattaacgatgtgtacatgtgcgatgagtactacggcgaaagtgtgctgcatttggcgatcgtcaacgaagatccggccatggtgaaatacctgctggatgccgggtccgacgtgaatgaacggtgctgcgggacgttcatgtgtccggaggatcaaaaagcatcccggttcgattcactggaaacggaaataatctgtgtgatgccacaaaccaactacgacggatacgtctattggggagagtacccgttgagcttcgccgcttgtttgggccaggaagagtgctaccggttggtgttggcacggggagccgacccggataaccaggattcaaacatgaacaacgttctacacatgatggtgatttacgaaaagttaacgacgttcgacatggcgtacgaagtgggttcttcgctgagcataagaaatctccaaaatctaacaccgttgacgttggccgccaagctgggtcgcgtcgaaatgttcttccacatcatgaacattgagcgggagatctactggcaattgggaagtattacgtgtgccgcctacccgctggcattgctcgataccatcgacatcgaaaccggcaacattagcaaagattccgcgctgaatctggtcgttttcggcgacaaagacgagcatttagatctcctcgaaggagtcctcatcgatctcctgaaaaccaaatggaacacgttcgtcaaggacaagttctacagccaatttttcgtgttcttttgctatttttgtgtgtcactgattagcttcacactgcgcgagggaccaatgaagctagaggacggagaggccaacaaaactaccacgagtattcagctaaaaaatatgaccctggccgacctcaccaacgccagtacgctgtcctcgctactggtcaccgacgtgagcggcaagatcgtcggactcaacgggagtgaaacgttcttcgacccgtcgacgatcgagtccgacatgttcttcaactccaagtgtccaacgatgatctacaagggtatcgaggggaaaattcgactggtttcggaagcaattattctggtgggatcatttctctatctggtttcggctttgagagaatctcgctttcttgggaggaaaatgtttatcgaaaatttgatgaccgctccttccagagtaatgttcctgttttcctgctgtatcatgatggtagttccttgcctcaaagtgctatgtttcaccgagttggaagatcacgttgcggtcgtgattatgctgacaactgcgccctacttcctgttcttctgtcgcggcttcaaaacggtcggaccgttcgtggtgatgatttaccgcatggtgatgggagatctgctccggttcgtggccatttactcggtgttcgtgatgggcttctcccaggcctactacatcgcgttcctgtcgtacaagggcgaggaggagggcgacgagaatccgatgccctcgccgatggagtcgatcgtggccatgtttctgatgtcgttgaccaactttggcgattactacgccgcgctcgaggataccgcccacgagggttgcgcaaaggtactctttgtgacatacatggtaattgtggcggtgctgttggtcaacttgctgatcgctatgatgggtaatacgtacaccaagattgccgagacgaaaaacgagtggcaacggcagtgggctcgcatcgttctggtcgtcgagcgaggcgttccaccggcagaacgtctgaagaacctaatgaactacagtcaacccatgtcggacggtagaagggccttggttttgcgattgaatatgacggaagaggataaggaagagatgaaggagatccttgacatgaaacgggtgcacgaacggctgtccaagaagcgagcagttgagcgggaagcacgcgccgagcagagacgtctcattgcggagaaatacgcaaacgtaccgtag

SEQ ID NO: 3 - DNA, 2652 bp, Anopheles darlingi
  nan-Adar
atgggaaatacggagagtaatgtgaccagtggcgttaagaagcaggccggagtgtccacccaggccctgtacaagttcgtcaacctgaagggcggtgggctgctggtggatatgatgaaacgggcgatccagaacaagcagtacgccgagattgaccacgcgatcaagacgaaggtcgaacccttcctgtacaacaaaggcaaaggaaagtacatcccggtgtcggtgctggtgctgttgcgaaacagtgagcgaccgaggcacaagcagctgcccgaaatccgggcgttggagaacccggaggaggactttgacatcgatgcagtgtgcccggaagtgagcgaagcggagtactacctcaacccatccgggtaccgggaggtgtgctggaacgtcaaggaacgtggagcagtcggtgagacgattctgcatctttgcctgctcaacgctacgtcactacatgccgatctggcgaagcggcttctacgcttctatccaaagctcatcaacgacgtgtacatgtgcgacgagtactacggcgagagtgttctccatctggccatcgtaaacgaggatcccgcgatggtgaaatacctgctcgatcacaactcggacgtaaacgagcgctgctgcgggacgttcatgtgcccggaggatcaaaaggcttcccgctacgatactcccgagacggaagtcgtccagatggtgcagctcacgaactacgatgggtacgtgtattggggcgagtatccccttacatttgccgcctgtctaggacaagaggagtgctaccggctggtgttggcccgcggtgccgacccggacaacaaggactttaacggcaacacggtactgcacatgctggtgatatacgagaagattaccacgttcgatatgggctacgaggtgggatcatcgttaagcatacggaatcaccagaatctaacgccgctaacgttggcggcgaagcttggccgcgtcgagatgttcttccacattatgaacattgagcgagagatttactggcagctgggtagcattacctgtgccgcctatccgctcgtcctgatcgacacgatcgacgtagaaaccggtaacatcagcaaagactcggccctgaatttggtcgtgtttggtgacaaagatgagcatctggatctactggacggtgtgctgatcgatctgctcaagaccaagtggaacacgttcgtgaaggataaattctatcgacagtttttcatgtttttctgctacttctgtgtttcgctgatcggcttcacgctacgcaatggaccaccaccgcccgaggaagacgacgaaaatggtgccggtggtggcggtggcaacaaaacgtcctcagcttcgaagcaggatcttcggcaacgattatggaaccgaacggtaacgttagaggacgcggacaatgtaagcagccttttaagtgacattatggggattgagttcgacggtggtggtggtggtggtggtggtggcagtgcgcttggcaaactggccgagcagcttcttaacggaagcgaaggatcgggtgcattcgaacccgaaacggtcgacgaggaagaggatggtctgttcttcaactccaagtgtcacaccatggattatgatggcgtcgagggaaaggtacgattcgtggccgaagtcatcatactgatcggttccttcctctatctcctctcggcgttgcgcgaactaaagtttcttggccgaaagatgttcttcgaaaatttggtaagccggtcaggacgatttgcggaccaaccaccgacaaatgcgatcagtggtttctcatcatttctttcgtttttaatcgcgatccaacagatgacagctccatcgcgcgtcatgtttctgttctcctgctgcatcatgatggttgtaccctttctgaaggtgctctgcttcaccgaactagaggatcatgtggcggtcgccattatgctaacaactgcgccatatttcttgttcttctgtcgtggcttcaagacggtcggtcctttcgtggtgatgatctaccgtatggtgatgggcgatctgctgcggttcgtcgtcatctatctggtgtttgtgatgggcttctcgcaggcgtactatatcgtgtttctctcctacaaaccggaggaggacggtgacgccaatccgatgccatcgcccatcgaatcgatcgtcgccatgtttctgatgtcgctgaccaactttggggattactatggagcgctcgaaaacacggatcacgagatgtgcgccaagatcctgttcgtgctgtttatggtgattgtcgcggtgctgttggtgaacatgttgatcgctatgatgggtaacacgtaccagaagatcgccgaaaccaagaacgaatggcagcgccagtgggcacgcatcgtgctggtggtggaacgtggtgtgccaccgaaggagcggctcaaaaatctcatgtcctacagtcaaccgatgtcggatggtcggcgggcactggtgctccggttaaacatgacggacgaagacaaagaggaaatgaaggagatcctcgagatgaaacgtgttcacgagcggctgtcgaagaagcggcaggtcgagcgggatgcccgggccgagcagcgacgtttgctgcgcgaaaaatatctcaacatgacgtag

SEQ ID NO: 4 - DNA, 2502 bp, Anopheles gambiae
  nan-Agam
atgggaaataccgagagcaatgtgaccagtggcgttaagaagcaggctggagtgtccacccaggcgctgtacaagttcgtcaacctgaagggcggcggcctgctggtggacatgatgaagcgcgcgatacagaacaagcagtacgccgagattgatcatgcgatcaagacgaaggtggaaccgtttctgtacaacaagggcaaggggaagtacatccccgtgtcggtgctggtgctgttacgaaaccgggagcggccgcgccacaagcagctgcccgagatccgggcgatggagaacccggaggaggactttgacatcgatgcggtctgtccggaagtgagcgaagccgagtactacctaaacccgtccggctatcgggaggtgtgctggaacataaaggaacgtggcgctgtgggagagacaattctacacctttgcctactgaacgccacttccctgcatgcggatctagccaaacgactgctgcgcttctatcccaagctcatcaacgacgtgtacatgtgcgacgagtactacggtgagaatgtcctgcatctcgcaatcgtgaacgaagatcctgccatggtgaagtatctgctcgatcacaacgcggacgtaaacgagcgctgctgcggtacgttcatgtgcccggaagaccagaaagcctcccgctacgatacgcccgaaacggaggtcgtccagatggtgcaggtgacgaactacgacggctacgtgtactggggcgagtacccgctcacctttgccgcctgtctcgggcaggaggagtgctaccggctggtgctggcccgcggcgccgacccggacaacaaagacttcaacggcaacacggtgctgcacatgctggtgatatacgagaagattgccacgttcgacatggggtacgaggtgggttcgtcgcttagcatccgcaaccaccagaacctgacgccgctgacgctggcggccaagctcggccgggtggagatgttctttcacatcatgaacatcgagcgcgagatctactggcagctgggcagcatcacgtgcgcggcctatccgctcggcctgatcgacacgatcgacgtggagacgggaaacattaacaaagattccgccctcaatctggtggcgttcggcgacaaggacgagcatctcgatctgctagacggggtgctgatcgatctgctcaagacgaagtggaacacgttcgtgaaggacaagttctatcggcagtttttcatgttcttctgctacttttgcgtgtcgctggtgagcttcacgctgcgcaatggaccaccaccggcggaggatgacgatgggaaggagagcgaggctggggggaataaaacggcagctgtcacgaaggaagagcttcgtcggcagctgtggaacgaaacgacgctagaggatgcgctggctgcgcttgccggcaatggaagcttcgctggacggttgtcgaatctggagcagagcaacggaagtagcgacgcgatgggtgagtttgatcctgccgagatggacgacgagggtctgttcttcaactccaactgtcacacgatggattacgacggtgtggagggcaaggtgcgtctcatatcggagatgatcatactggtcggttcgtttctgtatctgctcgctgccttgcgggagttgaagtttcttgggcggaaaatgttcttcgaaaatcttatgacagcaccatcgagggttatgtttctgttttcctgctgcataatgatgatcgtaccgtttctgaaggttctctgctttacggagctggaagatcacgtagccgtaacgatcatgctgacgacggcgccctattttttattcttctgtcgtggcttcaaaacggtcggaccgttcgtggtgatgatataccgcatggtgatgggcgatctgttgcggttcgtcgtcatctatctggtatttgtgatgggcttctcgcaggcgtactacattgtgtttttgtcctacaaaccggacgaggaaggcgacccaaacccgatgccgtcgccgatcgagtcgatcgtagcgatgtttctgatgtcgctgaccaactttggcgattactatggcgcactggagaacaccgaccacgagatgtgcgcaaagatcttgttcgtgctgttcatggtgatcgttgccgtgctgttggtgaacatgttgatcgctatgatgggcaacacgtaccagaagattgcagaaacgaagaacgagtggcagcgccagtgggcccgcatcgtgctcgtcgtcgagcgtggcgtcccaccaaaggagcggctcaagaacctgatgtcgtacagccaaccgatgtcggacgggcgtcgtgcgctggtgctacgattaaacatgacggaagataaggaagagatgaaggagatactcgaaatgaagcgcgtccacgagcggctctctataaagcggcagatcgagcgggatgcacgggccgagcagcgtcggctgctgcgcgagaagtacttgaatatgtcttcatga

SEQ ID NO: 5 - DNA, 2861 bp, Ceratitis capitata
  nan-Ccap
agctctaaggcttcttcactggaccacggaaagatgcaaagaaaacgctaaaaacttcgttaatacgtcagcccagactataggtaaaatctacggggtccgtcctatgaatgggttacaaatatcttatgtatatcacacgagaataaagtgcacggaagagctaagtttataagctgaaaatttcttcaatacgacactcggtatcacaagtaaaagcagcgaggttgaacccttggaagggtcttatgcgcgaatagtgtgttcagcgaggcgcttgcttacacctttcttccacataaaagttctgagcacctttctaagccatggggaataccgagagcaatgttaccagcggcgttaagaaacaagctggcgtctccacgcaagcactctacaaattcgttaatctcaaaggcggcggcctgctggtggacatgatgaagcgcgcttgtcagacaaagcagtttgcagagatcgatcatgccattaagacgaaggtggaaccttttctctacaataaaggcgctggtcgctactttcccatatcgaagttggtgctgttgcgtaataaagagcgtgcgcgtaccaagcagctgcctgagattagagcaatggagaatcccgatgaagattttaatatacacgatcattgtaccgaggtttcggaggctgagtacatatcgaatccgagtgcttatcgttatgtttgctggaatttgaatgaacgtggcgctgtcggtgagactatcttgcatctctgtctgttgaatgcctcatcgctgcatgccgatctggcgaaacgtctgctcaagttttatcccaaactcatactggatgtgtatatgtgtgatgagtattatggtgagagcgttttgcatatcgcgatcgttaacgaagatccagcaatggttaagtatctgctcgacgcaggcgctgatgtgcaagaacgctgctgtggcgccttcatgtccgcggaggatcagaaagcatcacgctacgactcacccgatcatgaatatgtcggcgtacaaccgatgaccaactatgatggctacgtttattggggcgagtatccgatgagttttgctgcttgtctctcgcaagaagactgttttcgtttggtattggcgcgcggcgctgatccgaatctgcaggacaccaacggtaatacctcgctgcatatgttggtgatctatgaaaagatcgaaatgttcgatgtggcctacgaggtgggtactaatatacatttgcgtaatgtacaaaacctgacagctttgacgttggcggcgaaattgggtcgcgtcgagatgttctttcacatattgagtattgaacgcgagatctactggcagttgggtagcataacgtgtgcggcatatccactctcgatgatcgacacaatcgatgtggagacgggtaatatcaataaggactcggttttgaattttgtcgtgtttggtgacaaactggagcacttggagctgctggatggcgtagtgatcgatttgttgaagaccaaatgggagtccttcgtcaagtcgcgtttctacaagcagttttatatgttctccttctattttctcttctcattaatcagtttcatctcgcgaccaggaccgactgaaaagaatgaggacgatgatgatgatgatgatgctgatgctagcgttgaggctaccgtaacgcgcgcagcgaatagtacggctccgctacaacgtggcgatcagtggttcaagcgcttgatcaagcgtgctatcgacaagatggaatacaaaaccttttggctgaacttcacagactactttgatgacaacgacgtggaatcggtgccaccgtggtgggcgagctatgccgagtgcccgcttatgaacatggaatcggacttagcgaagctacgcattgtggcggaaataattatattttttggctcggttctatatttattcgccgcgctgagagaggcacgctttctgggctataaaatgtttgtcgaaaatatgatgaccgcaccttcgcgtgtcatgtttcttttctcttgcgcactgatgatgtctataccttggctgagggtgttttgtctgactgagatcgatgaccacgtggcggtatttattatgcttacaacagcaccctattttctgttcttctgtcgcggcttcaaaactgtcggtcccttcgttgtgatgatctatcgcatggtcatgggtgatcttatacgttttgtctccatttatttggtttttgtaatgggtttctcgcaagcttactatattatttttctcacctttgacaatcccgctacaccggaggaaatcgatgactccgagtcgaatccaatgccctcaccaatggagtctatcgttgcaatgtttctgatgtcactcacgaatttcggtgactatttcggcggcatggcctcgacacagcatgaatatgaagcgaagacactcttctttctcttcatggtaatcgtcagtgtgttgttggtgaacatgttgatcgccatgatgggtaatacctatcagaagattgccgaaatacgcaacgaatggcaacgtcagtgggcgcgtatagttttggtggtggagcgcagtgtaccaccagcggagcggctcaagaacttcatgcactacagtcaaccaatgtcggacggcaggcgtgcgttggtgttgcgtttaaatatgagcgatgaagttaaggaggaaatgaaggaggtacaagagaccaaacgcatacatcagcgcttctcgaagaaacgacaaattgagcgcgaggcgagagcacaaaagagacaagaggagtatgagaaattctttggcaagaagccgtcgggcaacagtgataacaataatgcctaa

SEQ ID NO: 6 - DNA, 2563 bp, Musca domestica
  nan-Mdom
atgggaaatactgaaagtaatgttaccagtggtgtcaagaaacaggcgggagtttccacccaggccctgtacaaatttgtcaatctaaagggtggtggccttctggtggacatgatgaaaagggcctgtcaaacgaaacaattcgccgaaatagatcatgccattaaaaccaaggtggaaccatttctctataacaaaggagctggtcgttattttccgatttcgaaaatggttttgttacgcaacaaggagagggcacgcacgaaacaactgcctgaaatacgggcccttgaaaatcccgatgaagatttcaatattcacgactactgttccgaggtgtcggaggcggagtacatatccaatccgagtgcctatcgttttgtttgttggaatttgaatgaaagaggtgctgtgggtgaaacaattctacacttgtgcctgctcaatgcctcctcgttgcatgcggatttggccaagaggctattgaaattttatcccaaactcattatggatatttacttgagcgatgaatactatggagaatcggtgttacacattgccattgtgaacgaggatccggcaatggtgaaatatctattggatgccaatgccgatgtccaggagagatgctgtggtgcctttatgtcggccgaagatcaaaaggcttcgcgatatgactcccccgaacatgaatatgttggtgttcatcccatgaccaattatgatggctacgtttattggggtgaatatccactgtcatttgcagcctgtttatcgcaggaagaatgttttcgtttggtgttggcccgtggtgctgatcccgatagccaagataccaatggcaataccgtgttgcatatgttggtgatctatgagaaaatcgacatgttcgatgtggcctatgaggttggcaccaatatccacatacggaatgtacaaaatcttacacccctgacattggcggccaagttggcgcgggtggaaatgtttttccacattttgagtatagagagggaaatttactggcagttgggtagcataacatgtgccgcatatcctttgtcaaaaatcgataccattgatgttaagactgggaatataaacaaggattcggtgttgaattttgtggtgtttggggacaaattggaacatttggagttgttggatggcgtggtcattgatttgcttaaaacgaaatgggaaacatttgtcaagtcccgtttctacaaacagttttatatgttttccttctatttcctcttctccttggtgagttttatatcccggccaggacccaaaattgaggatgaagatgaggagggggatgcgaatgattcggcgggtaaaggaaatgattctaccacaaatgccagacttttgtatgccacacctgccagtagagtaacaggcattgaaaagttaccctacaaaacattttggcttaactttagtgagtacattgatgatgatgctaatgctgaaaatatgccctcctggtgggcaagctatgaggagtgtcccctgatggatatggaaacgaatttggcaaagttccgcattgtgtccgaaatcgtaattttctttggagcgattttgtatttgttatcggccctgagagaggccaagtttttgggttataaaatgtttgttgaaaatctgatgacggcaccctcaagggtcatgttcttgttctcctgctgcctaatgatgaccataccctggctaaggctatcctgtctcaccgaactggatgatcatgtggcggtgatgataatgcttaccacggctccctactttttgttcttttgtcgaggcttcaagaccgttggtcccttcgttgtgatgatctatcgcatggttatgggagatttgatacgtttcgtatcgatttatttggtctttgtgatgggcttttcccaggcctattacattatctttttgaccttcgataatcctgccacaccggaggaaattgatgataccggcacaaatcccatgccatcgcccatggaatcagtggtggccatgtttctaatgtccctgacaaatttcggtgattattacggggccatgggttcgacgcaacatgaatatgaagcgaaaattttattcttcctttttatggtgatcgtcagtgtgttgctggttaacatgttgattgccatgatgggtaatacgtatcagaagattgccgagatacgcaatgaatggcagcgccaatgggcccgcattgttttggttgtggaacgtagtgtgccaccggcagagcgtttgaagaatttcatgcagtattcacaaccgatgtcggatggacgcagggctttggtgttgcgtttaaatatgagtgatgaggacaaagaggaaatgaaagaggtgcaggaaatgaaacgcatacatcaacgcttttccaagaaacgccaaatggagcgggaggccagagccaaaaagcgccaggaggaatatgagaaattctttggcgcaacaccaacgtccgataatgaaaataataatttctaatcaaaattgctaggaaaatttaataaattgtgaaatgttaagttgg

SEQ ID NO: 7 - DNA, 2847 bp, Drosophila melanogaster
  nan-Dmel
cgtagcaacacagcgtaaacaaagcaaaggagctcaagttcagctgttgcattggcaacggacgtgcacggaaatgttttatcaatagccaccaatggacaaggacctcgccataacaaatagaaaattccaagagcagacagttcctccagcaatgtcgcggtttaaaagcgtttagaaattataaaaaaaaaacccaggggaagagtgaatttgggatcggataatggggaatacggagagcaatgttaccagcggggtgaagaagcaggccggagtctccacccaggctctatacaagttcgtgaatctcaagggcggtggactcctggtggacatgatgaaaagagcctgtcaaaccaaacagtttgctgagatcgatcatgctatcaaaaccaaagtggagccctttctgtacaacaagggcgctggacggtattttcccatctcgaagctcgtactgctgcgaaatcgggatcgcccacgcactcgccaattgcccgagatccgagccctcgagaatcctgacgacgatttcaacatccatgactactgccccgaggtttcggaggccgagtatatctccaatcctacggcctatcgattcgtctgctgggatcttaatatgcgtggcgctgtgggcgaaactattctccatttgtgcctgctaaatgcatcttccttgcacgcagatctcgccaaaagattgctaaaattctacccgaaactcatcctggacatttacatgagcgacgagtattatggagagagtgtcctgcacattgccatcgtcaatgaagatccggcaatggtgaagtatctgctggatgccaacgcagatgttcaagagcggtgctgtggagccttcatgtcggcggaggatactaagttttctcgcacggattcgccggatcacgagtatgtggcactttgtcccatgaccaactacgatggttatgtttactggggagaatacccattgagttttgccgcttgcctgtcgcaggaggagtgcttccgcttagttttggccagaggtgccgatcccgacttccaggacaccaacggaaacaccgttctccacatgctggtcatttacgaaaagatcgaaatgttcgatgttggctacgaggttggaacaaacatacacataaaaaacattcagaatctcacgccccttactttggcggccaagttgggcagagttgagatgttcttccacgtgatgagcatcgaacgggagatctattggcaattgggtagcatcacatgtgccgcatatccgcttttgatgatagacactataaatgaggaaaccggcaatatcaacaaggactccgtgctgaactttgtggtatttggcgataagctggagcacttggagctgctagatggggtggtcatagatctgctaaagaccaaatgggacacgttctgcaaatcgcgattttacaagcaattttacatgttcgccctctactttctcatctcgctgttcagttttatactgcgtccaggtccggatgccaaggacgaagacgaggatggcgccaatagcactacggctaaaagtgatctgtataggcaaaatggatcggattcttaccatctgcacagcaagcgggctacaatgactaccgaatacaaaacattttggcttaattttactgagtactacgatccatcggaagttgaggtcctgcccgcctggtgggaaagttatgctcagtgtcctttgatgaatctcgaatccgatttggccaagcttcgtattatggcagaactgttgaattttgtaggagctatcctgtatctgctggttgctttgcgagaagctcgattcctgggccttaaaatgtttatcgaaaacttgatgacggcaccttcgcgagttatgtttctgttttcgtgtgctttgatgatgactataccctggttgagggtttcctgtctcaccgaaatagatgatcacgtcaccgttgtgataatgctaaccactgctccctattttctattcttttgtcgcggcttcaaaactgtcggtcccttcgtagtgatgatataccgcatggtcatgggagatctgctccgattcgtctccatctacttggtgttcgtcatgggtttctcccaggcattttacataatttttctaaccttcgacaacccatcgtcaccagaggatcaggacgcggaatccaacccaatgccctcgcccatggaatcgatagtggccatgttcctaatgtcgctaacaaatttcggtgactactatggagcgatggtgtctacgcagcacgaatacgaggcgaagatcctcttctttctgttcatggtgatcgtgagtgttctgctggtgaacatgttgatcgccatgatgggtaatacgtatcagaagatcgccgagatccgaaacgagtggcagcgccaatgggccaggatcgtcctcgtcgtggagcgaagtgttcctcccgccgagcggttgaagaactttatgcagtacagtcagtcgatgtcggatggcagaagggcactggtcctccggttgaatatgactgaggaaaaggaggagatgaaggaggtgcaggagatgaagcgcatccatcaacggttcgccaagaagcggcaaatggagcgcgaggctcgcgcccttcgacgtcaacaggagtacgagaagttcttcggcaccgcccccaaatcggaatgttccgataacaacaacttttgaagatccatttggacaaaccagagtcacttacttagttcaagttttattgggccatgttaatatgtatgtgttctttttgggcaataaatttagactacattgcgcttcacaattcaagt

SEQ ID NO: 8 - DNA, 2586 bp, Acromyrmex echinatior
  nan-Aech
atgggtaataccgagagcaatgttgcgagcagcgtgaagaaacaaacggatacgtcgtccatcctgctctataaattagtcgacttgaagggtggcggattgttggtggacatgatgaaaagagccacgcagactaagcagtttgcagagttggatcacgcgatgagaaccaaagtagaaccgtttctgtacaacaagggaaaaggcaagtggataccagtggacaaattagttcttctacgaaataaagatcgtccgcggcataaaatgctaccgcctttaaaagctatggaaaatccagctgattacgatatcgataaagacatgggcgacgaggaagttgatgaggccaagatcgataaaagcaaatatagactggtatgttggaatttaagcgacagaggtgctgttggcgaaactatcttgcatttgtgcatgttgcacgcgaccgccattcatgctgatttggcaaaacgactgttgcgtttctatccgaagcttataaacgatatttatctaagcgatgagtactatggagagaatgtcttgcacatcgctattgtaaacgaggatccatcgatggttaagttccttctcgacagcggagcagacgatccgtgcattatccacgagaggtgcttcggcaacttcatgtgcccagaagatcagaaggcgtcgaggtttgacaatatggaccacgagtgggtgtgtgtttcaccggaaaccaattacaacggttatgtgtactggggagaatatccgttaagcttcgccgcatgtctcggtcaggaagagtgctacaggcttatattagccagaggtgcagatcctgataagcaggacacgaatggcaataccgttatgcatatgctagccacgttcgacatggcttatgaagtaggagcttctctcggcataagaaacgttcaacatctgactccgttgactttggctgcaaagttggccaggattgagatattctttcacatcatgaatatcgaaagagagatatactggcaaatcggtagcataacttgcgcagcctaccctttatcgcaaatagatacgatcgacgttaatacgggcacaatcaacaataattccgccctgaatctggttgtttttggtgataaagatgaacatttagagttaatggacggtgtgttagtcgatcttttaaatgccaagtggaacaccttcgttaaatcccgattctacaatcaattctttcttttctgcttctacttcgtactatcgctgattagcttcacccttcgacctggcccatcaaccatagaaacagacgaaaatgcaaatgatacgtcgacgaggacaaattcctccaacataacggagcctataattcacaagactctccaaagctcggatctgtcagaattggttacgaatagtctcgtagcggcttttacctcgaattttaaatcatccttaaatatgacgcaggaatcgctagaaaagatccagctacaagtaacgtcaaacatcacgtcagccctgaagagcattttgctcttgacgttgaacgaaaatgagggcattctgagtcctcctgacgaggccaccattcatacgctgtggtataccgatagccctccaaacgcgtcggattattttatgaatacttacaacaaaaccgacgcgaattcaactgtcaagacaattatcgacggcgtcgcgcgaccaaaatttaaaagcaattattggtgggacgatttctcggaggagtgcagactcatgcagctatcagaaatgagtgcaaaaattcgtctaactgcggaaatttttatgttcatcgcagcggtgctctacattttggctgcgttgcgggaggcgaaattcttaggtcttcatatgttcatcgaaaatctcatgacggtgccgtcacgcgtgatgttcctgatctcgtgctgcatcctgatgtggttcccggttctgcgatttacttgctccgacgaggtcgaagatatgctagcagtcgtagtgatgctgacgacggcgccatactttttattcttctgccggggcttcaagacggtcggaccgttcgtcgtgatgatttacaggatgatcatgggtgatctcatcagattcgtctctatctacctcgtttttgtcatgggattctctcaagcatattacatcatattcctgtcattcgacaacccgaatactccagagggcatcgacgactctatcacgaatccgatgccatcgccgatggaaagtgttatggcgatgttcctgatgagcatgacgaatttcggtgattactttggcgcgtttgacagaaccgagcatgaattcgaggccaagctgctgtttgtattgtacatggcgattgtggcaatcttgctcgtgaacatgttgatcgctatgatgggcaacacttaccagaagatcgctgaaaccaggaacgaatggcaacggcaagaggaagacaaggaagagatgaaggagatactcgagatgaagagaacccatgatagattgctgaagaaaagacaaaatagaatgtcaaaggaaaagattatatttgaaacagaacctattattaccaagaattga

SEQ ID NO: 9 - DNA, 3347 bp, Solenopsis invicta
  nan-Sinv
gtccgctacgatcggccgactgatacgtctggtgaatttatcaatgcgcgctctatcaatgaaaggatcacaattaccttttcggcgtagcatcctgttgagccgcaacaacaggatttcctaccgaattttggcctctggcccaattaattctttccaccgtcaaatttgcggaattttttgcggttttccgttttccgatgtaagttccgacaggatattccgcgcggttcgcgataaacgtggagaacgtacggttataattcaattgcgaaggaatgataaaaggcgcggtaaattgcctaaattggattgatcgaatttcgccgtaagtccgagagcaagaggtgtttgaaggtccgtttaatcgataatcgactacggtatcctggcaaccgaatagcacgtttatcaatttcggcggctatcggttgcatacaccgtgccgcatattcgatatgcgagagccacatctcctccataggcacttaaacgtcggaagtgaagtgttttgtaaacgatgggtaataccgagagcaatgttacgagcggcgtgaagaaacaaacggacacgtcgtccatcctgctctataaattagtcaacttgaatggtggcggattgttagtggatatgatgaagagagcctctcagaccaagcagtacgcggagttggatcacgcgatgagaacgaaggtcgagccgtttttgtacaacaaaggaaagggcaaatggatacccatagaaaaattggtcctcctacgaaataaggatcgtccgcgacataaaatgctaccacctttgaaagccatggaaaatccagcggattacgatatcgataaggatatgggcgatgaggaagtcgacgaagctaagatagataaaagcaaatataggctggtgtgctggaatctgagcgacagaggtgccgtcggcgaaaccattttgcatttgtgcatgttgaacgcgacagccatccacgccgatttggcgaaacgactgttgcgtttctatcctctgcttatatacgatatttatttgtgcgacgagtattacggggagaatgtcttgcacatcgctatcgttaacgaggacccgtcgttggtcaagtttcttctggatagtggagcggacgatccgcgcattatccacgaaaggtgcttcggcaccttcatgtgtccggaggaccagaaggcgtcgaggtttgacagtatggaccacgagtgggtgtgcgtcacaccggagaccgattacaatggctatgtgtactggggagaatatccgttgagtttcgccgcatgcctcggtcaggaagagtgctacaggcttatactagccagaggcgcggatcctgataagcaggacacgaatggcaacaccgttttgcacatgctggtgatatacgagaaaatagctacgttcgacatggcttatgaggtaggagcttctctcgacataagaaacgttcaacacctaactccgttgaccttagcagcaaagttggccaggatcgagatgttctttcacatcctgaacatcgaaagagagatatactggcaaatcggtagtataacttgcgcagcctaccctttatcgcaaatagatacgatcgatgttaacacggggacaattaacaaaacttctgccctgaatctggttgtttttggcgacaaagatgaacatttagagttgatggacggaatgctagtcgatctgctaaacgccaagtggaacactttcgttaaatctcgattttaccgtcaattcttcctcttctgcttccacttcgtgctgtcgctgattagcttcactcttcgccctggcccgtcgaccatggaaacagatgaaaacgcgaacgatacgtcgacgaagacaaattcttcaaatataacagagcccataattctcaagcccctccaaagctcggatctgtcggaactggttacgaatagcttcgtggcggcttttgcgtcgaatctcaagtcatccttaaacatgacgcaggaatcattggagaaaatccagctgcaagtaacatcgaatatcacatcggccttgaagagcattttgctcttgacgttgaacgaaaacgagggcattctgagtcctcctgacgaggccaccatccatacgccgtggtataccgacagctctccaaatacgtcggactatttcacagatctctacaataaaactgtcgtagccgaaaattcgactgtcaaggcagttgtcgatgacgtcgcgcaaaccgattactggtgggacgatttcgccgaggagtgtagactgatgcagctaacagaaacgagtgcgaagattcgtctaactgcggaaacttttatgtacatcgcagcggtgctttatatcttggctgcattgagggaggcgagatttttaggtctcaacatgttcatcgaaaatctcgcgacggcgccatcgcgcgtgatgtttctgttctcgtgctgtatcctgctgtcgttcccatttttgcgatttgtctgcgcggacgagatcgaagacatactggcggtcgtggtgatgctgacgaccgcgccgtactttctgttcttctgccggggcttcaagacggtcgggccgttcgtcgtgatgatttacaggatgatcatgggcgacctcctcagattcgtctgcatctaccttgtcttcgttatgggattctcccaagcgtactacatcatattcctgtcgttcgacaatccgaacactccggagggcaccgacgactcgataacgaatccgatgccgtcgccgatggagagcgtcatggcgatgttcctgatgagcatgacgaacttcggagattactttggcgcgtttgaaagaaccgagcacgagttcgaggccaagctgctgttcgtgttgtacatggtgatcgtggcgatcctgctcgtaaacatgttgatcgccatgatgggcaacacttaccagaagatcgccgaaaccaggaatgaatggcagcggcaatgggcgcggatagttttggtcgtggagagaggtgtcagtcccgctgaaaggctgaaaaaattgacagactattctcagcccatgtccgacggccgtcctgcgttggttcttcgattacatcaaactgaggaggacaaggaagagatgaaggagatactcgagatgaagagaacccacgaaaaattgctgaagaaaagacaatgcaggatgtcaaaggagaagattctgtcttgagcggggaagcccattaaaaaaaatcgagctaatactggagtttccatgacaacgaaacgtcgtgttatcatgtcggacagactcggactgtcgtagaactcgagtggagaacgcgctaaaaagaaagaag

SEQ ID NO: 10 - DNA, 2707 bp, Camponotus floridanus
  nan-Cflo
atgggtaatacagagagtaatgttacgagcggtgtaaagaaacaaacggacacatcgtccatcgtgctttataaattagtcgatttaaaaggtggtggtttgttagttgatatgatgaaaagagccactcagacaaagcagtttgcggaattagaccatgcgatgagaacgaaagtcgagccctttttatataacaagggggaaggcaaatggatacctatagacaaattggtcctcttacgaaataaagatcgtccgcgacacaaaatgctagcaccgttaaaagctatggaaaatccagcggattacgatatagacaaagatatgggcgatgaggaagttgatgaaactaagatagataaaagcaaatatagattagtgtgctggaatttgagtgagagaggtgctgtcggcgaaactattttgcatttatgtatgttaaacgctactgctctccacgctgatttggcagactattacgtttctatccgaagcttataaacgatatttatctatgcgacgaatattacggtgaaaatgtattacatattgctattgtgaacgaggatccatcgatggtcaagtatcttctcgacagcggcgcggacgacccgcgcattatccacgagagatgcttcggtaattttatgtgtccggaagatcagaaagcatcgaggtttgatagtcaagatcacgaatgggtgtgcgtcacaccagaaaccaattataacggatacgtgtattggggagagtatcccttgagctttgccgcatgccttggtcaggaagaatgctacagacttatacttgccagaggtgcggatccggataaacaggatacgaatgggaacaccgttttacatatgctggctacgttcgatatggcctatgaagtgggggcttctctagacataagaaacgttcaacatctgactccattgactttggcagcaaagctagctaggatagagatgttctttcacattctgaatatcgagagagagatatactggcaaataggtagcataacttgcgcagcctatcctttgtcgcaaatagatacaatagacgttaatgcaggaacaatcaacaataattctgctctaaatttggttgtttttggcgagaaagatgaacatttagagttaatggacggcgtcctaatcgatcttttaaatgccaagtggaacacttttgttaaattccgattctatcgtcaattcattctcttctacttctactttgtgctatcgctgattagtttcactcttcgtcctggcccgcaaacagatgaaaatgcgaatgatacattgacaaactcattcaacacgacgagggaatccatgattctcaagtctcttcacagttcggatctatcagaactggttacaaatagtttcacagcagcttttacttcgaacttcaaatcatccttaaacgtaacgcaagagtcattggagaagatccagctgcaagtgacgtcgaatgttacatctgctctgagaagcattttgcttttaacgttgagcaacaatgaggatcttttgagttcccctgatgaggccgccattcatacactgtggtataccgataatcctcaaaacgcgtcggattatttcataaatatgtataataaaactgttacaattgatactaactcaaccgccctaccatcgacgatgtcacactattaggaaaatttaacaatcacgaaaaatggtgggatgatcttacagaagaatgcagactgatgcaattgacaacaatgagcgcgaagatccgtcttactgcggaaatcgtgatgtattttgcggcagtgctctacatcttggctgcgttgcgagaagcgagatttttaggtctcaacatgttcattgaaaatctcatgacggcgccgtcgcgcgtcatgtttctgttctcgtgttgcatcttaatgtcgtttccggttctgagactttcctgctccgatgaggtcgaagacgtgctggcagttgtagtgatgctaacaacggcgccatattttttattcttctgccgaggtttcaagacagtcggcccgtttgtcgtgatgatttacagaatgattacgggcgatctcctcagattcgtctctatctatctcgtcttcgtgatgggattctctcaagcgtattatatcatatttttgtcgtttgacaatccgaatactccggaaggcgttgacgattcgataacaaatcctatgccatcgccgatggagagcgttatggcaatgtttctgatgagcatgacaaatttcggcgattattatgccacgtttgacagaaccgagcatgaattcgaagccaagctgctgttcgtgttatatatggcgatcgtggcaatcctgctcgtaaacatgttgattgctatgatgggcaacacttaccagaagatcgctgaaaccagaaatgagtggcagagacaatgggcgcgcatagtcttggttgtggagagaggcgtaagtcctgctgaaagattaaaaaaattgatggactattctcagcccatgtctgacggtcgtaaagcgttggttctccgattaaatcaaactgaagaagacaaggaagaaatgaaagagatacttgaaatgaaaaggacgcacgataaattaataaagaaaagacaagacaaaatattaaaggagaaagctttagctgaaacagaagctgttattactagaaaataa

SEQ ID NO: 11 - DNA, 2718 bp, Harpegnathos saltator
  nan-Hsal
atgggcaataccgagagcaacgtcacgagcggcgtgaaaaagcagacggacacgtcgtccatcatgctttataagttggtcgatctgaaaggcggtgggttgttcgtagacatgatgaagagagcagcgcaaactaagcagttcgcagagttggatcacgcggtgagaacaaaggtcgagccctacctgtacaacaaaggaaagggcaagtggatacccgtggacaaactggttcttctaagaaacaaagatcgtccgcgacataaaatgctggcacctttgaaagccatggaaaatccggcggattacgacatagataaggacatgggtgatgaagatgttgacgagactaaaatagacaaaagcaaatacagactggtctgctggagcctgagcgagagaggcgctgtcggtgaaactatcctgcacttgtgcatgttaaatgccactgctctccacgcggatctggcgaaacgattgctacgcttctatccgaatctcataaacgacatttacataagcgacgaatactacggagagaacgtgctgcacatcgcgatcgtaaacgaggacccagcgatggtgaagtatcttctagacagcggtgcggatgttcacgagaggtgcttcggtaacttcatgtgtccggaggatcagaaagcgtcaagggttgatagtctggaccacgagtgggtgtgcgttgcaccggagaccaattacagcggatacgtgtactggggagaatacccgttgagcttcgccgcgtgtctgggccaggaggagtgctacaggcttatgctcgccagaggcgcggatcctgacaagcaggacaccaacggcaacacggttttgcacatgttggtgatatatgagaagctgactacgttcgacatggcgtacgaagtgggagcctcgttggccataagaaacgtccaacacctgactccgctgacgttgtcagcaaagctggccaagatcgagatgttctttcacattctgaacatcgagagagagatatactggcagatcggtagcataacttgcgcagcttacccgttgtcgcaaatagacacgatcgatattaacatcgggactatcaacaagaactccgccctgaatttggttgtttttggggaaaaagacgagcatctagaattgatggacggtatgttagtcgaccttctgaacgccaagtggaacactttcgttaagtctcgattctaccgtcaattcttcctcttctgcttctacttcgtgctgtcgctgatcagcttcactcttcgcccgggcccgttgccgcaggagaccgaaaatgcgaacgatacgagaacgaattcatcgaacgcaacggcgatggagattcttaggttgttccaaagctcggacctgtcgaacctcgtcacgaacagcctcgccgcggcttttgcctcgaacctcaaatcgtccttaaacgtgacgcaagaatcgttggagaagatccagctgcaagtgacgtcgaacattacatcggccctgaagaatattttgccttcgctgagcgacaacgagggcatcctgagtgcccctgacgaagccgccattcgtacgctgtggtataccagtagtccgtacaatgagtcagattacttgacagatgcttacaacgagaatgtcacgagcgatgcgaattcgaccgcggggacgatcatcggcagcatcgaggtgtcgaagtccaacgataaggacaattggtgggaagatctgacggaagaatgcaggctgatgcagctaacgacgataagtgcgaagatccggctgactgcggaagtgctgatggaaatcgccgcggtgctctacattttagccgcactgcgggaggcgaggtttttggggctcaacatgttcgtcgagaatctaatgacagcgccgtcgcgcgtcatgtttctcttctcgtgctgcatcttactctcgtttccatttctgagattagcctgcgccgacgaagtcgaagacatgttggcggtcgtggtgatgctgacaacggcaccgtatttcttattcttctgcagaggcttcaagacggtcggtccgttcgtcgtgatgatttacaggatgatcatgggcgacctcctcagattcgtgtccatctatctggtcttcgtcatgggcttctctcaagcgtactacattatatttctgtcgttcgacaacccgaataccccggaaggcgtcgacgattcggtatcgaacccgatgccgtcgccgatggagagcatcatggcgatgttcctgatgagcatgacgaacttcggcgactactacggcgcgttcgagcgaaccgaacacgagtccgaggctaagctgctgtttgtgttgtacatggcgatcgtggcgatcctgctcgtaaacatgctaattgctatgatgggcaacacttaccagaagatcgccgagaccagaaatgaatggcaaagacaatgggcgcgcatagttctggtcgtggagagaggagtcagccccgccgagaggctgaagaagctcatggactactctcagccgatgtccggcggccgtcgagcgttggtcctccggttgaatcaaagtgaggaggacaaggaggagatgaaggaaatactcgagatgaagaggacccacgatagactgctgaagaagaggcaagggagaatgtcaaaggagaaagttctggccgagagcgaaattattattacccgaaattga

SEQ ID NO: 12 - DNA, 2791 bp, Apis florea
  nan-Aflo
  misc_feature (1292)..(1292): n means a or g or c or t/u
tcgtgccggtatcaaagatcgtgtgtccttctaccaataaaaagacaacgagatgggaaatacggagagcaacgtggccagcggtgtgaagaaacagacggacgcgtcgtccattttgctttacaaattagtcgacttgaaaggaggtggtttattggtagatatgatgaaaagggcaacgcaaactaaacaatacgcggaattggatcacgcactgagaacaaaagtagaaccgtatttatataacaagggtaaaggtaaatggatcccgatcgagaaattggttttgttgaggaacaaggatcgtccaaagcacaaaatgcttccaccgttgcgggctatggaaaatccggccgattacgacatagacaaagatacgggcgaagatgaagtgagggacgagacgagaatagataaaagcaagtacagattagtatgctggagcttgagcgagagaggagcagtcggtgaaacaattttacatttgtgtatgctacatgcaactgctattcacatcgatttggctaagcgtttgctacgtttttatcccaagcttatcaacgatgtttacataagcgacgagtattatggcgagagcgcattacacatcgcaatcgtgaacgaggatccgtcaatggtgaaattccttttggatagcggtgcggacgtgcacgaaagatgcataggaaactttatgtgtccagaggatcaaaaagcgtcgagagcggacagtctggatcacgaatgggtttgcgtaactccggaaactaattacaacgggtacgtttactggggcgagtatcctttaaattttgccgcgtgtttgggacaggaagagtgttacagattgatactcgcgaggggggctgaccccgacaaacaagatacgaacgggaacaccgttttacacatgctggtcatttacgaaaaattggcgacattcgatatggcgtacgaagtgggcgcatcgttagcgatcaggaatgctcaacacttaacgcccttgacgttgtcggccaaattggcaaagatcgaaatgttttttcacattttgaacatcgagcgagagatttattggcagatcggaagtataacgtgcgcagcttatcctctctcgcaagtcgacaccatcgatgtcgacacgggaagcattagccacaattccgctctaaatctggtcgtgttcggcgaaaaagacgagcatttggaattgatggacgggattctggttgatctgttgaacgccaagtggaacacattcgtcaaatttcggttttatcgtcaatttttcnctttttgtttttactttgtcctgtcgttgatcagtttcacccttcgacctggcccagcgacgacatcatccgttcccaaccccgtcgctcaaacgccccttacgtccaccgaattgtccacaatttccccaaaagtggatcctcccgtctcgaacgttactgtcaatcgaagctcgaatgctttccaacacgattccaatctctccctccttcttgataaaattctttccactgcaagcgtaaaatatccttggaacgtgacaagaactcgtctcgataagctgaagctcgatatcatcgagaatttgacaaccgctttgaacaatctactgtcgacacaccgagacgagatcgaattttttaaccactcttacaaaacaaccgaatatttccattctacgagaaacgataccacgccgatcgataatttgaaaattacgatcaatgaaactgtcctttcggtaaattcgacgattctgttcaacgatgggatatcgtttgccactggcaaatacaactggtggaacaatcttacagaagaatgtagactaatgcatgtagatacgttatcgacaaagattagattgactgctgaagtattaatggaaattgcggccactctttacatttttgcagcattgcgagaagccagattccttggtcttaatatgttcattgaaaatctaatgactgcaccgtccagagtgatgtttctcttttcctgctgtatattgttaaccttcccatttttaagattgatttgcgccgaccaagttgaagatatgctagctgttgtcgttatgttaaccacggcaccgtatttcttatttttctgtagaggtttcaaaacggtcggcccattcgtcgtgatgatttacagaatgatcatgggcgatctcctccgtttcgtctccatttacttggtcttcgtgatgggattttcccaagcatactatattatatttttatctttcgataatccaaatacaccggaaggagtagatgattcgatgagcaatccaatgccgtcaccaatagaaagtataatggcaatgtttcttatgagcatgacaaactttggagattattatggtgcttttgaaagaacgcaacacgagatagaagccaagtttttatttgtagtatacatggcgatcgttgctatattattggtaaatatgttaattgccatgatgggaaatacgtatcagaaaattgcagaaacaagaaatgaatggcaaagacaatgggcacgtatagttttagtagttgaaagaggagtgagccctgaggaaagacttaagaaattaatggattattctcaaccaatgtccgatggtcgaagagcattagtacttcgattgaatcaatcggaagaggacaaagaagaaatgaaagaaattctagagatgaaaagaactcatgataaattatacaaaaaaagacagagcaaaataatgaaaaagattttaacatcagaggataatgttattttataa

SEQ ID NO: 13 - DNA, 3068 bp, Apis mellifera
  nan-Amel
tttatattaacattattaaacatcattatctatatgcactgaaatatattctttgagaactttagaatcaacttggcgccgtggcttagttggttaaagcgcctgtctagtaaacaggagatcgagggttcgaatccctccggggcctacgagagataaaaccaattttcgacaagtgtgtatcgttacgccttgcagaataatcattttgcgtgatcgatatgaagaatgtaatgccatggcaacgcaatagcagagaatggtatgagcattaaaatcgcatcgatcactcgaatcattcgtcatcaccgtgctggtatcaaagatcgtgtgtccttctaacaataaaaagacaaggagatgggaaatacggaaagcaacgtagccagcggagtgaagaaacagacggacgcatcgtccattttgctttacaaattggtcgacttgaaaggtggtggcctattggtggatatgatgaaaagggcaacgcaaactaaacagtacgcggaattggaccatgccctgagaacaaaagtagagccatatttatataacaagggtaaaggtaaatggatcccgatcgagaaattggttttgctgagaaacaaagatcgtccaaagcacaaaatgcttccaccgttgcgagctatggaaaatccggccgattacgacatagacaaagatatgggcgaagacgaggtggacgagacgaaaatagataaaagcaagtacagattagtgtgctggagcttgagcgagagaggagcggtcggtgaaacgattctacatttgtgcatgctacacgcaactgctattcacatcgatttggctaaacgtttgctacgtttttatcccaagcttatcaacgatgtgtacataagcgacgagtattatggcgagagcgcgttacacatcgcgattgtaaacgaggacccgtcaatggtaaaattccttttggatagcggtgcggacgtgcacgagagatgcataggaaactttatgtgtccagaggatcaaaaagcgtcgagggcggacagtcttgatcacgaatgggtttgcgtaactccggaaaccaattacaacgggtacgtttactggggcgagtatcctttaaattttgctgcgtgcctgggacaggaagagtgttacagattgatactcgcaaggggagccgaccccgacaagcaagatacgaacggaaataccgttttacacatgttggtcatttacgaaaaattggccacgttcgacatggcgtacgaggtgggagcatcgttggccatcaggaatgcccaacacttaacgcccttgacattgtcggcgaaattggcgaagatcgagatgtttttccacattttaaacatcgagcgagagatttattggcagatcggaagcataacgtgcgcagcttatcctctctcgcaagtcgacaccatcgatgtcgacacgggaagcattagtcataattccgctctaaatctggtcgtattcggcgaaaaagatgagcatttggaattgatggacggaatcctggtcgatctgttgaacgccaaatggaacacgttcgtcaaatttcgcttttaccgccaatttttcctcttttgcttctacttcgtcctgtcgttgatcagtttcacccttcgacccggcccagcaacaacatcgtccgtatccaatcctcagatcacgtccaccgaattgcccacaattcccccaaaaatggatccacccgtccacaattccgatctccccctcctccttgacaaaattctttccaccgctctcgtctcgaaaaggtatccttggaatttgacgagaacgcgtctcgacaagctgaagctcgatatcgtggagaacttgacatccgctttgagcgatatgctcgggacataccgaaacgagatcaaattgtttaaccgttctgacaaaacgtccatctactcgtctagaaacgacgctaaaccgatcgacgagactgtcctccggataaattcgacgatcctgttcaacggcgatgggatatcgtttaccagcaagtacaattggtggaacaatcttacagaggaatgcagactcatgcatctagatacgttatcgacaaagattagattgactgccgaggtattaatggaaattgcggccactctttatatttttgcagcattgcgcgaagccagatttctaggtcttaatatgtttatagaaaatctaatgaccgcaccgtccagagtgatgttcctcttctcatgctgtatattgttaaccttcccgtttctaagattgatctgcgccgacgaaattgaagatatgttagccgtggtcgtcatgctcaccacggcaccgtattttctattcttctgcagaggtttcaaaacggtcggcccattcgtcgtgatgatttacagaatgatcatgggcgatctgctacgtttcgtctccatttacttggtcttcgtgatgggattttcccaagcatactacattatatttttatctttcgataatccaaacacaccggaaggagtagacgattcgatgagcaatccgatgccatcaccaatagaaagtataatggcgatgtttcttatgagcatgacaaactttggagattattatggtgcttttgaaagaacgcaacacgagatggaagccaaattcttatttgtagtttacatggctatcgttgctatattattggtaaatatgttaattgccatgatggggaatacatatcagaaaattgcagaaacgagaaatgaatggcaaagacaatgggcacgcatagttttagtagttgaaagaggagtgagccctgatgaaagacttaaaaaattaatggattattctcaaccaatgtctgatggtcgaagagcattggtacttcgattgaatcaatcggaagaggacaaagaagaaatgaaggaaattctagagatgaaaagaactcatgataaattatacaaaagaagacagagcaaaacaatgaaaaagattttaacatcagaagataatgttattttataatattattatttatattttgcaaatatattgatacatcgatataa

SEQ ID NO: 14 - DNA, 3944 bp, Megachile rotundata
  nan-Mrot
ctcctgatatgtggctttaatggaaagtaacgatctagtaagtcgtagtttgttcaattggaatacgcatgataatgtaggaaaattgaatcggtaaatagttaaacacattgaagaatgtaaaaagcgaaaaaaaaaccacgggctcgtccgggatttgaacccgggacctctcgcaccctaagcgagaatcatacccctagaccaacgagccgtgatagcagaagtttcttaatctgcgtgatatgtctgctttcttgagactatatttgtcttgctgtaattataatctttaacgcctaatatctacaatttgtactcggcgcgtatcggtcaattagtatgtatcataatttctttggaaccttcctcgaagaccatgtattgaacatcgtttcgtataaaatttaacgcgtggaatgtataaaaatgtttaaacaatcccagattcgtaagttcaattatgaaatacatagtgaagtgtagatgtaataagtgaaacgtttgaaatatgtatgtacagttggagaaagaagtagatttcaattttttatgaagtatttaaacaaatagaatgtttatatttatttattcttgatcgtataatatgaactgttgctaaaaaacacctttcaacgaggcgccgtggcttagttggttaaagcgcctgtctagtaaacaggagatcgagggttcgaatccctccggagcctggagaagatgaatatttttttttcgttacagaactaaatcttaatcttttgcaaagatcttaatgtatcataaaattgagtaaaatgcaaagcagtcgaatactcgtttaaaaaccttaccatttcatacgatttatttctagcaaaacagaacttgataaacccacgttattccataatgcaggagattataaaagtaagtatagtcattacttggttttttccttgcattctcctgttaccaatgtttttctcggttgtatcttttcaattagttacgaaataagaataatcattaaagaatggaaaatatgtacgaacatatatcgaagcgtgtttgcgtgatcgatgtcgaataactactctatggtaacgaggagaccaaatatattcccgatgtttgtgggctctatttgttccgaaaaagaatgatcactttcgatcgttaacatcatcgaataaaattaattcacaaaatcatggggaacacggagagtaacgtaactagcggcgtgaagaaacaaacagactcctcttctatcttactttacaagctggtcgatttaaaaggtggtggtttattagtggacatgatgaaaagagcaacgcaaactaaacagtacgctgaactagatcacgctctaagaacaaaagtggagccgtatttatacaataagggtaaaggtaaatggatcccgatagaaaagttggttctactgcggaataaagatcgtccgaagcataaaatgcttccaccattgagggctatggagaatccggctgattacgacatagacaaggatatgggcgaggaagaagtggacgaaacgaagatagataaaagcaagtacagattggtctgctggagcttgagtcaaagaggagcagtaggagagacgattatgcatttatgcatgttacatgcgactgctattcacaccgatctggctaaacgtttactacgtttctatcctaagctcatcaatgacatctatatcagtgacgaatactatggtgaaaatgcattacacatcgctatagtgaacgaagatccagctatggtaaagttccttctagacagcggcgccgacgtgcacgaaagatgcgtaggaaattttatgtgtccggaggatcagaaagcgtcgagaacagacagcgtggaccacgaatgggtttgcgtggctcccgaaacgaattacagcggatacgtttactggggtgaatatccattaaacttcgccgcgtgtttaggccaagaagagtgctacagattgatactcgctagaggagcagatcccgacaagcaagacaccaatggaaacacggttctgcacatgttggtgatctatgaaaagatggccacgttcgatatggcgtacgaggtaggagcatcgttatcgatcagaaacgcgcaacatttgacaccgctgacgttatcggcgaagctggcaaggatcgaaatgttttttcacattttgaacatcgagagggagatttattggcagattggcagcattacgtgtgcggcttatcccctctcgcaagtggacactatcgatgtgaacactggtagcatcagccacacttccgccctgaatctggtggtctttggagaaaaggatgagcacttggaactaatggatggtaccatggttgacctattaaacgcgaagtggaacacctttgtcaagtccagattttatcgccagttcttcctattttgtttttactttattctttacttgatcagtttcactcttcgacctggtccttcggtcacatcgactgctacaactgctccgactacagaatcgaccacaccgaaattgccagatcctcctccaaattttattccagttacgaatcaaaaaacgtttctcgaagcgagcctctcgtcgtccttggatgaaattgtgacaaacgccctgaatttaaatttcccttcgaacgcgacggctcgctttgacgatctaaaactcgatctcgtaacccacataatgtctaatctgaagaacatattgaatgggaacgagaccaaaaacgagccatttaacagctcccaactcgccaggtttgacaaacatttattccgcgaaaatgacactgattattctactagcatcttgaacgagaccgccgacgttgattccacgacgaagttttcgtttgacaattctgtactgtttgaggctgataataaaagcgattggtggactgatcttaccacagaatgccgattaatgcaactgaccaccgcatccgcgaagatccgattaatcgcagaaatatttatggaaatcgcagctattctttacattcttgcagcgctaagagaggccaggtttctaggtctcaacatgttcatcgaaaatctgatgactgtaccatcgagagtaatgtttctcttctcctgttgcatactgctctcttttccgtttctgagattatcctgtgctgacgaagtggaagatgtgctagcagtggtagtaatgttgactacagcaccatattttttgttcttctgcagaggtttcaaaacggtcggccctttcgtcgtgatgatttatagaatgatcatgggcgacctacttcggttcgtatccatctatttggtctttgtaattggattttctcaagcttattacatcatatttctatcttttgataatccaaacacgccagaaggtgttgatgattcagtgagcaatccaatgccatcaccaatagaaagcatcatggcaatgtttctaatgagtatgacgaactttggagattactatggtgcatttgagaggacccgacatgaaatggaagccaagtttctgtttgttgtatacatggctattgttgctatcttacttgtgaacatgttgattgctatgatggggaatacgtatcaaaaaattgcagaaactaggaatgaatggcagagacaatgggcacgtatagttttggtagtagaaagaggagtaagtcctcaagaaaggcttaaaaaattgatggattattctcaaccaatgtctgatggccgcagagcattggtgctcagattaaatcaatcggaagaagataaggaagaaatgaaggagattttggaaatgaagaggactcatgagagattatataaaaagaggcaacttaaaacaacaaaagaaaagactacaataacagaggagaatgttactttatagtattatttttattctataaatataaagacattcattctgt

SEQ ID NO: 15 - DNA, 3055 bp, Nasonia vitripennis
  nan-Nvit
aacggcgtatcctgtttttacacacacttgattaaaattccaaaattaataaattcataatctagatgcattataaagaacaattatttatattgtcgcgccgttgcatcgtcggcgtagaaaacagtttgatcgataattcgtttctacgtcacgtgggttcagccgagcgtaaaattcctggttaatatacactcatgactcgccgcgctaacgtagcgtcaacgttttgttcagcttcgactagtcagttttattaataataacgcgatacgctatattgttggcctttgaaacatgggtaacgccgagagcaacgtcaccagcggcgtgaaaaaacagacggatgcaggtgcgatcgccctgtacaaactcgttgatctcaaaggtggtggtctgctggtggacatgatgaagcgggcctcgcaaacgaaacagtacgctgagatagatcacgcaattaggacaaaagtcgagccgtttctgtacaacggaggcaaaggcaagtggatacccatagcgaaactggtgctcttgaggaataaagaaagggggagacacaaaatgttacccgtgctcaaagccatggagaagcccgaggactacgatatcgataaggacatggctaacgacccggagccggatgaaaacacaatcgacaagagtaaatacaagctcgtctgttggaccctgagcgacagaggagcagtgggcgagacgattctgcatctctgcatgctcaacgccacgcagctccacgcggatctggcgaagaggctgctgcgcttctatccgaacctcatcaacgacatttacatcgatgacgaatactacggagagaacgtcctgcacatcgcgatagtgaacgaagacccgtcgatggtgaaattcctgctggacagcggagcgaacgtgaacgagcgttgctgcggcaacttcatgtgtccggaagatcaaaaggcttctaggaacgacagcgtcgagcatgaatgggtctgcgtatgctcggaaaccaactacgatggttacgtctactggggcgagtatcctttgagcttcgcagcctgtttggatcaggaggaatgctaccggctgatactagccaaaggcgccgatccagatagccaggacacgaacggcaacaccgttctccacatgctcgtcatttacgaaaagctcgaaaccttcgacatggcctacgaggtcggttcttccttgtcgatacgaaacgtcctgcaactgacacctttaacgctagccgccaaactcgcgagggtggagatgttcttccatattctgaacatcgagcgcgagatctactggcagatcggtagcatcacctgcgcggcttatccgctttctcagatcgacactatcgacgtggacaccggaaagatcagcaacaactcggcgttgaatttggtcgttttcggtgataaagaggagcatctcaaactgctggaaggcgtgctgatcgatctactgaacgcaaagtggaatactttcgtcaagtccaggttctaccagcagttctacctcttcttctgttacttcatcctctcgctgataagctgcaccctccgacctggtcccataacgaagaccgacgctccaaccacgacaccacatcccatgaacgacacgagcatcgagtccatcactccgacctcggaacctttagagctgcagaccttgtcgtcgcttctggcgaaaaacttggccgaacaactcgtcatgggtatgaagatgtacggcaacgtctccgaggactcactcgcgaggataagtctccaggtggcttcaaacatcagcggctcgatcaaggacatctggacgaggcagaacctcacgagcaacgacaccgactacgtcgatatcgcaggaggtctgtacgcggacgtcaacgagaccagcgcgagtgatcccttcgatttgaacgcgagcgatatcgtgattcttaagaagggaaagaaggaactcgatgactggtgggatgacctaaccgaagactgccgactcatgcagatgaacagtacctcggcgaaaatccgcctgacggccgagatattcatggaattcggcgctatactttacatatgcgctgcgctccgagaggcgaggttcctcgggctcaacatgttcatcgagaatctcatgacggctccgtcgcgcgtcatgtttctcttctcctgctgcatcctcctgtcctttccgtttctgaggatgtcctgcgccgacgaggtcgaggacatactcgctgtagtggtgatgctcacgaccgcgccctacttcctcttcttctgcagaggcttcaagaccgtcgggcccttcgtcgtcatgatctacaggatgatcatgggtgacctgctcagattcgtctcgatctatctggtcttcgtcatgggcttctctcaagcttactacataatcttcctgtcgttcgacaatccgatcacgcccgagggtgtcgacgacagcaaagctaatccactaccgtcagccatggagagcatcatggcgatgttcctcatgagcatgacgaatttcggcgattactacgacgctttcgagaacaccgagcacgagatgttggccaagtgtctcttcgtcgtgtatatggccattgtgtcggttctactggtgaacatgctcatcgctatgatgggcaatacctaccagaagatcgctgaaacgaggaacgagtggcagagacagtgggctaggatagttctcgtggtggagagaggagtagccccggcggagagattgaagaaactgaacgtttactcgcaaccgatgtccgatgggcgtaaggcattggtactgaggttgaatcaaactgacaaagataaggaggagatgaaggacatcctggaaatgaagaggatacacataaaatcgataaagagacgcaaggacaagctgcagaaggcgaaagaagacgctgaaaagctccagcagcagatggccgataaggacaataaggacaaagccgttattatacaatgagaatttttctatgtatataataaagcgctcttgtaaatatattcaa

SEQ ID NO: 16 - DNA, 2154 bp, Dendroctonus ponderosae
  nan-Dpon
atgggtaataccgagagtaatgttactagtggcgtcaaaaaacaggcgggagccgccatgcagccgatatataaactttgtgatttgaaagggggcggtctgctggtggaacttatgaaaagggcagcccagaataagcagtacgcggaaatagatcacgccatcaaaactaaggtggaacattttctgtacaataaaggtgccgggcgttatatcccaatatctcaaatggtgcttttaaggaacaaggaacgcgggaagcataaactgctgccccaacttagaggaatggaaaatcctgaggattttgaagtcgatgatgaaggacccgaaataactgaagaagagtacaataaagatccatcattatatcggcatgtttgttggaagctgagagaaagaggagcggttggagaaacaattttacatctttgtttattgaatgccacttctctacatgcagacatcgccaagaggctattgaggttctatcccaaattgatcaacgatatttacatatcagatgaatactatggtgaaaatgttctacatatcgccatagttaacgaggatccttccatggtaaagtttcttcttgccgcaaatgtgaactttcaggaaagatgtttcggtaatttcatgtgtccagaagatcagaaatcatcgagaactgattctctagatcacgaatgggtgaatgtttatcacgaaacaaattatgatggatatgtgtactggggtgaatatccattgtcatttgctgcatgtttaggtcaagaagaaagttttcgattaattttggcaaagggtgccaatttagatgcacaagacactaatggaaacactgtcctgcatttattagttatttattccaaagtggaagctttcgatatggcatatgaattaggtgctcacctttcaataagaaacattctgaaaatgacacctttaacgctggccgccaagctagcaagaatggatatatttttccatattttaaagctagagagggaaatttactggcagataggaagcattacatgtgccgcctatcctctatctcagattgatacgatagatgttaagactggacaaatcagtaaaatgtcagcgctgaatctggtagtatttggtgataaagatgaacatttagaactgctcgatggagtattagttgatctattaaatgccaagtggaatacgccgggaccaccaattcatacggactctccgaaaaacagcactaatactaccaaacaacttaaaataccaaatgctactatccaaagtatcattatgaataacagcaatgatgattatgatgttgaggaatggtgggataatttacgagaggaatgtcgattaatgaatttagacacgactgagtcactagtgagatttactgctgaacttggaatcacgtttggtgcatttctttatttggcggccgcaatgactgctccttcgagagttatgttcttgttttcctgcattttggtttttggagtaattcctagcctgcgcttggtatgcatggatgaagttgaagatataatcgcagtagtagttatgctaacgacggctccatatttcctatttttctgtagaggctttaaaacagtaggtccgtttgtggtaatgatctatcgcatggttctaggcgacttgctacgtttcgcaactatatacatggtttttgtcatgggattttctcaagcatactacataattttcttgtcttttgataacccattgacaccagaagacgtcgatgactcggctacgaatccaatgtcaactccatccgaatccattatggcaatgtttttaatgtccatgaccaacttcggagattattacacagcatttgctaggaccgagcacgaatatgaggctaaaattcttttcgtaatatttatggccattgtggcaattttgttaattaatatgttaatcgctatgatgggtaacacataccaaaagatagcggaaacgcgtaacgaatggcagcgacagtgggctcgcattgttttggtcgtagaaagaggtgttagcccacctgaacggctcaagcaattgaatgtttattcacaaccaatgagcgatggcaaaagagctctcgttttaaggctcaaccagtcggtaagatattag

SEQ ID NO: 17 - DNA, 2875 bp, Tribolium castaneum
  nan-Tcas
atatctaattgcctaattaaccctaatggcagcttcattcacaaaacatgcaatttaattataacttcacatattttttcgtgtaaagcaacgagcgccttcgtctcacacgtactcgtatttatagaaatccaaattgtttgatcaataaaatttgtgccgcacacaagatgattttttatcaaaaagtgatgtttgtttggaaaaaactgataaagaaaaccatttctaaaattttcaagccccttaaaaaaacgctactttaaaaacaaaccatgggtaataccgaaagtaacgttactagtggtgttaagaagcaagctggtgcttcagtgcaaccaatttataaattatgcgatttgaaagggggagggctcctagtggaattaatgaaacgggccacacaaaacaagcaatatgcagaactagaccacgcaataaaaaccaaggtggagcactttttgtacaataaaggggctggacggtatttcacaatatcggacttggttcttttgaggaataaggaaaggtctcgccagaaatggttaccacaattgaaagcaatggaaaaccctgaagattttgaaattgatgatgaaggccccgaaataacagaagaacagtatcaaaaaaatccgcatttgtaccgtcacgtttgctggaaaatcaaggaacgcggagccgtgggcgaaagcataatgcacttgtgtttgctaaatgccacttccttgcacgctgatatcgcaaagaggcttttacgcttttaccccaaattgattaacgatatttacatgtcggatgaatattacggagaaaacgttttgcacattgctatcgtaaacgaggatccgtcaatggtaaaattccttctagattcgggtgtaaatatccaagaacgctgctgtggcaactttatgtgtcccgaagatcagaaatcgtctcgttatgactccttggaccacgagtgggtcaacgtttgcccggtcacgaattacgaaggctatgtatactggggcgaatatcctctaactttcgccgcgtgtttaggacaggaagagagctttcgcttgatgctgtccaggggggctgatcccgatgctcaagacaccaacgggaacacggtcctacacttgcttgtcattttgcagaaattggaggctttcgatatggcctacgaagtgggggccaaattatcaatccgaaacgtgttgagtctgactccactaactctggccgcaaaacttgccagaatcgatatgtttttccacattttgaacttggaacgcgaaatttattggcaaattggcagcatcacgtgcgctgcttaccctctatcgcagattgatacaattgacattgaaacgggccaaataagcaaaacttcagcccttaatcttgtggtgtttggtgacaaagacgagcacttggagttgatggacggtgttttgatcgacttgcttaatgcgaaatggaacacttttgtcaagtttaaattctacaaacagtttttcacgtttgcgttctattttttgatctcccttgttgctttcacgctacggccagggcccccacacaaggaggccaaactggtgaatgtcacaataaacgccactgtttcaaatacttccaagtgggaaaatctcacttctataccgttcggtaaaaccccggatgatgatgacagcgacatggaagaatggtgggacaatttgcaagaagaatgtcgcttgatgcaactagaatcacccgaatctaaaattcgactcactgcagaggttttgatggttgtgggggcttttgcatatctggcagccgcagttcgcgaggctaggtttttaggggggcgcatgtttttcgaaaatcttatgactgcaccgtcaagagtcatgtttttattttcttgtattttaatgttaacggtgccatgtttgagactggcttgtttggatgagtttgaagatattgtagctgtggtgattatgttgaccactgcaccgtattttctcttcttctgtcgaggttttaaaacagtgggacccttcgttgtgatgatctacaggatggtgatgggtgatttgataagatttgcttcaatttatctagtgtttgtcatggggttttctcaagctttttacatcatttttctctcgtttgataacccactaacccctgacgacgttgacgattccgcaactaaccccatctccacccccatcgagtcaattatggcgatgtttctgatgtcaatgaccaatttcggtgactattatgcggccttcgaaaaaactgaccatgaatacgaagctaaaatgttgtttgttgtatttatggtaatcgtttcaattttactgatcaacatgttgattgccatgatgggcaacacttaccaaaaaatcgcagagacaagaaacgagtggcaaagacaatgggcgcgaattgttttggttgttgaaaggggggtgagtccctctgagcgtttgaaacaacttatggtttattcacaacctatgtccgatggaagaagggctttagtgttgagattaaaccagtctgacgaggacaaggaggaaatgaaggaaattctagaaatgcggcgcaggcatgaaagacacataaagaaaagaagcgaaaagttgaaagagaatgcaaaaaagaattgaaagcacgtttttgtgaacagttactgtaggtataaaatttattaaaggacttaattacatgtctttaacaagcaaatttgaaaaataacagatcactaccaatctacattatgatatgaagttgtttcaaatttgtatgtccgtcctgctagttgaaaatttgaataggctattaatcctatcgtcaccttatatacgtatttacagaaataata

SEQ ID NO: 18 - DNA, 3397 bp, Nilaparvata lugens
  nan-Nlug
acatggggaagtagtgttagtcccacagtgaaaggggtaggagggcccttgttaaaccacacaccgctcacggtttcgccaatggaattcaagatagatatttgaatttgagagaattatttttcgaaaggtgtgtgttgtactggaaaatgattattaggaccaatttgcgagcttcagacaggcagcactgtcatattcaagcatttcaattcaccagtacgacatcaagatcattgatggtattccattgattgatctgaagggaaactcagctacgattaaactactgttttgcagattggtttctacggtagaacttatttacagtttttcccagtgaaacgttttttaaaactataatgcaatgggaaatacggagagcaatgtcaccagtggtgtcaagaagcagacggacacctcgtccattactatgtacaagttggtcgacctcaagggcggaggtcttttggttgagctgatgaaaagagcaacgcagaacaagcagtacgccgagctggatcatgcaattaaaacgaaagtggagccatttctctacaataaaggcaatgggcgactcatttcaattgccaaactcgtcctcttgcgaaacaaagatcggccccgcaccaaaatgcttccacctctcaaaaacatggagaacccagatgactttgatgttataggaagcaatataccaggcattccggagcccaaagagactgatgatccaagcacttacagagacgtctgctgggacctgaatgagaggggagcagtgggtgagactattctccatctctgtctgttgaacgccacttcggttcacgccgatctagccaaacgtcttctcaagttctatccgaaacttatcaatgatatctacatgtgtgacgagtactatggagagagcgtactgcacatagcaatcgtgaacgaggatccaggcatggtgaagttcctgctgaactcgggagccgactttcacgaacgctgcttcggcaacttcatgtgtcccgaggaccagaaggcatcccgctcagattccttcgatcacgaatgggtcaatctctggcctgtcaccaactacgagggctatgtttactggggcgaatacccgctatcttttgctgcgtgtttgggtcaggaggagtgctatcggctcatgctagccaggggggccaaccccgacaaccaagacactaatggcaacactgttcttcacatgcttgtcatatacgagaaaatgggaacgtttgacacagcttacgagctgggtgccaacgtatcggtgagaaacattcagaacttgacacctttgacactggcagccaagctggccagaattgaaatgttcttccacataatgaacatcgaacgagaaatttactggcaaattggtagtattacttgtgcggcctatcccttgatgctgatcgatacaatagatattgaaacagggaatattagcaaagattcggctctcaatcttgtcgtatttggggacaaagatgagcatttggatttgatggaaggcgtgctggtagatttgctccatgccaaatggaatgcatttgtcaagttcaggttttaccgccagttcataatgttcttccagtactttctgatatcgtgcgtgtgcttcatactgcggccgggtccccccgaagcgcacgacggcatgaacatcaccgccaatgctacactcaacctgagcttcggggtgcttgaagtccgacctgaggctttgcaagcgctgctctacaggctcgagaagctgtcactgccccagtcgggtgatctggaaaggttcattctggaatctctggctgatgagaagtcaatttcagaagctgcattagagaacgatgagaatcgggaaccaggctggaacaatagtgtgttttcaacgtatgaaacgctggctcgtgacacgggctaccaaactgatgagagtccacatgacggattgtcgagtagtatggattatgctgaggtggccgagcgattgaccaaactgatgattgatgtcaatctgactgagaggagtggagctgtcaatgagattatactgaaagccttgcctagtcttgaggagaaagaggacggtttggaggagtggtggagcggaatagccggtgactgtatcctgttgcaggtgaatgacctctacgacttggcacgcctgtgcgccgaggtggcgcttgaaattggcgcctttctctacctgttggcagcactgcgcgaggcccgcttcctcggactcaaaatgatgatcgagaatctgatgacggcgccgtcacgtgtgatgttcctgttctcgtgctgcctgatgatgacgatgcccttcttccgcttcacctgccaggacgagaccgaggacatcttggccgttgtcatcatgctcacaacggggccttacttcctcttcttttgcagagggttcaaaacagtgggacctttcgtagtgatgatatacagaatggtaatgggtgatcttctccgtttcgcatccatttatttggtgtttgttatgggattttcacaagcgtattacataattttcttgacgtacgacaacccgactacaccagaaggtacggacgacactacgtcgaatccactgcccagtccaattgaagccattatggccatgttcttcatgtcactcaccaactttggagactactactctgcgttcgagaacaccgaacatgaaattgaagctaaggctttctttgtgatttacatggtgattgtggcaattcttctaatcaacatgttgatcgctatgatgggtaacacttatcagaagattgctgaaacaaagaatgaatggcaaagacagtgggcaagaatagttctggttgtggagagaggtgttagtcctaaggaacgcttgaaaaagctcatgtcctattcacagcctatgtccgatggaaggagggctctggttctcaggctgaacatgacggaagaagacaaggaagaaatgaaagaaatcctggaaatgaaacgtgtacatgataaaattgtcatgaagcgcaaaaaaggcttgaaattgttggggactacaactcctagtccaaagaggatgaaaggccgagaaactcctatttaaaaccgtataacatttcagtttttgttttatatctgcagtgagttataattattttggcaaagtaattcaataaatccattctccttctcccacagttcattatagtgatccaaaatttagtagtaattttatctaggttattattctttatagtctactgctcatgacaaacagcttttttttatttcactttacaaaatttcaaaactctgtatcctgtttgaaattaaattttatattttgtattcaaaaaaaaaaaaaaaaaaaaaaaaaaaa

SEQ ID NO: 19 - DNA, 2880 bp, Acyrthosiphon pisum
  nan-Apis
aggacggaaacccgcgagtaatatccgcggaccgggcaaagtacgacttccaaattcgtcgtcgtcttcgtcgtcatcaccgccgtcgtggtgataaccgtctcgaaacatgggtaacaccgagagcaatgtggccagtggtgtcaagaagcaagtcgacacctcgtcactgcagatatacaaccttgtcgacctgaaaggttgtggtcttctcgtggatttgatgaagaaagccgtgcagacgaaaaattttaccgagctggacaacgcgatcaaaacccaagtggaacccatgctgtacaacaaaggtgaaggtagaatgatacctatcgccaaactcgtgttgctgagaaatcgcgaccgttcccgggcaagatggcttccaccgctaaagaacatggaagacaccaatgattacgacatagaaaaagacattcccaccattgaagaactggaaaagctgggggaagtgcagtacagggaagtgtgctgggatctgaaggaaagaggcaccgtcggcgaaacggcgttacatctatgtttgctgaacgctacgtcaatacacgcagacttggccaaaaggctgttgcatttctatccaaagctcgtaaatgacatttacatgattgacgagtattacggagagagcgttttgcacatggccatcgtcaacgaagatccggccatggtgaaggtactgatggacagcggggctaacctcaacgaacggtgtttcgggaacttcatgagcactgaagatcaaaaggcttctagatcggattcgctcgaccacgaatgggtgaacctatgtcccgacaccaattatgaagggtacgtgtattggggcgaatatccactgtcatttgcagcgtgtctcggccaagaggagagctaccgtttgatgttggcgagaggcgctgacccaaataaccaggacaccaacggcaacacggttctgcatatgcttgtaatttacgaaaaaatttcgacgttcgacatggcctacgaaattggggcggaactcaacattaggaacgtgcaaaatttgacgccactcacactggccgcgaaactggctcggatccaaatgttctttcacatactcaaaatcgaacgggaaatttattggcaaatcggcagtatcacttgtgctgcgtaccccctgacccaaatcgacaccatcgacaatgacaccgggcagatcagcagaaactcggcgctcaacttggttgtatttggcgaaagtccggaacacttggagatgatggacggtgtgttggtggatctgttaaatgccaaatggaacgctttcgtgaaattccggttctataggcagttcatcttgttcgccttttacttttccatatctatggtatgcttcgtgctgcgtcccggaccgccacccactggtcttaagccaccattaatcaactacacttccacgtcgaccacggtggccaccacgccgtttgacttcatggacaacgagtcgatgttgcccgacatgtacgacgagatgatgatcggcggtggcggtccgaccgagttcgagacggtgcaggtgaccacggaaatggcgacgaccagcgacaacgcgacgacgaccaacaacggtagcggtatcggaacgccactgatctacgaggacggcggcggtggaggtggtggaggtggtaccgtgagcttgcacgggaagagttcgggttcggacaggggcaaacacaggagcacgtggagtccggccaaccatacgttcaagaccaactacacgtacaactacaacaaatcaagaaaattttggtggaacaagagacaaaaggtatgcagattaatggctgtgcactcgactgacgatttaatcagaatgggatcggaagtgggaatgtttatgggagcattcctctatcttctggccgcggtcagagaagctggttttttgggcacacagatgttcattgaaaacttggccatagcaccggcaagagtgatgtttctgttctcgtgcctgctcatgatgaccataccgccgctgagactgacatgctatgacaaagccgaagacataatagccgtaatcattatgttgaccacttgtccgtactttttgttcttctgcaggggtttcaaaaccgtcgggccattcgtggtgatgatctataggatggtgatgggagacttgttgaggttcgtttccatttacatggtgttcgtgatgggtttctcgcaagcttattacgtgattttcctgtcttacgacaatccgctgacgccagagggtatcgatgactcggtactgaacccgatgcccacgccgaccgagtccatcatggcgatgttccttatgtccgtcaacacgttcacagactactacacggcgtttgacaagactagtcacacgttggtcgcaaagttttgctttatagttttcatggtaatcgtggccatattgctggtgaacatgttgatcgccatgatgggcaacacttatcaaaagattgccgagaccagaaacgaatggcagagacaatgggctcggatcgtactggtggtagagagaggtgtcagtccgtcgcaaaggctcataaagctcatgtactactcgcaaccgatgtcagatggccggagggcgttggtgttgcgactcaatcagacggatgaagacaaggagcaaatgaaagagatattggaaatgaaacgcattcacaatcgctatgtagaaagaatgcgcgccagagacctgagcagcaaactatcgtcttcgtgcggaaaaaatgcaaacaatgggacatttaatctaaaagcaaatgaataatatttgtaaaataataatttaagtcgataagaagtatgtacagaattatacatagaattacatatata

SEQ ID NO: 20 - DNA, 3040 bp, Myzus persicae
  nan-Mper
accggatctcgcgacgaaaacaaccagggcgacgaagactccgacggagacgccgacgaggacgaaaacccgcgtataatatcggcggccgggcaaagtatatccgaattcgtcgtcgtcttcgtcgccatcgtcgtgataaccaccaagaaacatgggtaacaccgagagcaatgtggccagtggcgtcaagaagcaggtcgacacctcatcattgcagatatacaacctggtcgacctgaaaggttgtggtcttctcgtggatttgatgaagaaagccgtacagacaaaaaattttgccgagctggataacgcgatcaaaacacaagtggaacccatgctgtacaacaagggtgaaggcagaatgataccgattgccaaactcgtgttactgagaaatcgcgaccgttcccgggcaagatggcttccaccgttaaagaacatggaagacgccaatgaatacgatatcgaaaaagacattcccaccatcgaagaactggaaaagctgggggaagtgcagtaccgggaggtgtgctgggatctgaaggaaaggggcactgtcggcgaaacggcgttacatctatgtttgctgaacgctacgtctatacacgcagacttggccaaaagactgttgcatttctatccaaagctcgtaaatgacatttacatgattgacgagtactacggagagagcgtgctgcacatggctattgtcaacgaagatccggccatggtgaaggtactgatggacagcggggcagacctgaacgaacggtgtttcgggaacttcatgagcactgaagatcaaaaggcttccagatcagattctctcgaccatgaatgggtgaacctgtgtcccgacaccaattacgaagggtacgtgtattggggtgaatatccactgtcatttgcagcatgtctcggccaggaggagagctatcgtttgatgttggcaagaggagccgatccaaataaccaggataccaacggcaatacagttctgcacatgctcgtaatttacgaaaaaatctcgacgttcgacatggcctacgaaatcggggcggagctcaacattaggaacgtgcaaaatttgacaccactcacgctggccgcgaaactggctcggatccaaatgttctttcacatactcaaaatcgaacgggaaatttattggcaaatcggcagtatcacttgtgccgcgtaccccctgacccaaattgacaccatcgacaacgacacggggcagatcagcagaaactcggcgctcaacttggtcgtgtttggcgaaagtccagaacacttggagatgatggacggtgtgttggtggatctgctaaatgctaaatggaacgctttcgtgaaattccggttctataggcagttcatcttgttcgcgttttacttttccatatccatggtgtgcttcgttttgcgtcccgggccgccacccactggtcttaagccgccattaatcaactacacttcgacgtcgaccacggtggccaccacgccgtttgacttcatggacaacgagtcgatgttgcccgacaacgtcatgtacgacgaaatgatgatcggcggtggcggtccgaccgaattcgaaacgccggtggtaaccacggagatggcgacggtcaatgacaacgccacaaccaacaacggtaccggtatcatccgtacgccactgatctacgaggacggtgctggaggtggtggtggaagtggtaccgtaagcttgcacggtaagagttccggttcggacaggggcaaacacaggagcacgtggaatcccgccaaccatacgttcaagaccaactacacgtacaactacaacaaatcgagaaaattttggtggaacaagagacaaaaggtgtgcagattaatggcagtgcattcgactgatgatctaatcagaatggggtcggaagtgggaatgtttgtgggagccttcctctatctactggccgcagtcagagaagctggatttttgggctcccagatgttcattgaaaacctggccatagcaccggcaagagtgatgtttctgttctcgtgcctgctcatgatgaccataccaccactgagactgacgtgctatgacaaagccgaagacataatagccgtaatcatcatgttgaccacttgtccgtactttttgttcttctgcaggggtttcaaaaccgtcggaccgttcgtggtgatgatctacaggatggtgatgggagacttgctgagattcgtttccatttacatggtgttcgtgatggggttctcgcaagcttattacgtgattttcctatcttacgacaacccgctgacaccagagggcattgacgattccgtgctgaacccgatgcccacgccgaccgagtccatcatggcgatgttccttatgtccgtcaacacgttcacagattactacacggcgttcgacaagactagtcacacgttggtcgcaaagttttgctttatagttttcatggtgatcgtggccatattgctggtgaacatgttaatcgccatgatggggaacacttatcaaaagatcgccgagaccagaaacgaatggcagagacaatgggctcggatcgtactggtggtagagagaggtgtcagcccgtcacagaggctcaaaaagctcatgtactactcgcaaccgatgtcagatggtcggagggcgttggtgttgcgactcaatcagacggatgaagacaaggagcaaatgaaagagatattggaaatgaaacgcattcacaatcgctatgttgaaagaatgcgcgcaagagacctgagcagcaaactatcgtcttcgtgcggaaaaaatgcaaacaatgggacaattaatttaaaagcaaataaataatatttgtataataataatttaagtcaataagaagtatgtacagaataaataattatatatagatttacatataattatatatatattatgtatagctgtataaaatacataaattatattcataatgtatatataattaagatactttcagcaaagatgttttgttagctataataa

SEQ ID NO: 21 - DNA, 4101 bp, Bemisia tabaci
  nan-Btab
caggtctgtgttagtgggccaaagttctccggcggatcacaagttacgggtgttttttcagcgaaatttgccacatgttgatggccggatataacgtgtttgtgcgtggtgcgtgttcgcaaacgattttacctcactgcgggccattcaaaatgcggaatgcaaatgggattgcgaccgaagccgtcctgagacgtaacattaagtgcggtgatacagcatagctctcggcaatgtttttgatcaaactgatttgtgacaaaggataaactgcagaccgcgattggtcgctttgcaggggtatcaatttggcatcaatttgattaatctttaacacctgtgctaaataaccaagcacaatgggaaacgctgagtcaaatgtcacctccggtgtcaagaagcaagccgacacctcctccatcctcatgtacaagttggtggatctcaaaggaggagggttgctggtggagttgatgaagcgagcggcgagaacgaagcaatttgcggagctggaccacgccatcaaaaccaaagtggaaccgttcctatacaacaagggcgagggtcgtcttattccaatctcccacctcgtcctcatccgcaacaaggagcggccccgtcacaaatggctgccatacttgaaacatatggatatggacacggaactagatatagaaaaaatgccaatcgataacgatcctgagaaaattgatccgaagaaatgccgagaggtatgctgggatttgatggaacgtggagcggtgggtgaaactattctccatctgtgcctcctcaacgccacatccatccatgcagacttggccaagcgactcctccgcttttatccgaaacttatcaacgatatatacatgtgcgacgaatattacggtgaaagtgtgctacatattgccatagtgaacgaagatccagcgatggtgaagttccttttagacagtggcgctgactaccacgagcgttgtaccgggaacttcatgtgtcctgaggatcagaaggctacaaggcaggacacagttgagcatgaatgggtgaatctgtcgccactcaccaactacgagggatacgtgtactggggtgagtacccacttagttttgcggcttgtctgggccaagaagagtgcttccgactcatgctcgcgcgaggagcaaatcccgataatcaagacacaaatggaaataccgttcttcatatgctcgtcatctatgagaaactcgaaacatttgacatggcatacgaagttggcgccaacatttctgttcggaatgtccagaatttgactcctctcactttggcagcaaaactcgcgagaattgagatgttcttccacattttaaacatcgaacgcgaaatctattggcaaattggcagtattgcatgtgcagcttatcctctagggcaaatcgacacaattgacatcgaaacaggacacatcagcaaaaattcggctcttaatcttgtggtctttggggacaaagacgaacatctggagttgatggatggcgttttggtggaccttttgaacgccaagtggaacgcttttgtcaaattgaggttctatcgccaattcttccagttcctcatctacttcttggtctcgctggtttgtttcacgctgcgacctggcccgttgccgaatggagatccgccagcctcgcctcccacgggagctcccacgaacacgagcatgttcccgaaggagaacaccaccgactacgtgcctcaagttgtagccgcattcagggccgtcatcggtgatccccacgcctacaagcgccggaaacgacaagccctgaatggtgactcgcgggtcacttccgttgagccggaggcaccggaaatgaccgctaataatggaaaagttgcctctgataacaacacgaacgaatctttggcgaactcgtctactggtgatcgtgttagcagaaggtatttaatgatagacgagcaaaataactcaaacttagacggtctttctagtgtaaaatttttgagcgaactctcaagaaatgacgagcacatatctatttccggtttgcgttatcctgcgtggccaacgagcgagaaaccatctgacgaatcgcggcctgccgttttccctgaaagttcaaaagttggtttcacctccagtttgaaacccgaaaatggaaaattacaggaaatttcagtaaatacaatgactttgccgtcattcggtaaaagaaattcgtactctaataagtcttccattgcaagagcattaaatatttcgatggaggcgaataaatcgttgggcaaatcagcgacttctagaactagtactgaagctccgtttaaatcaaatgtgcaaatttttaagaaaatcgatgctccctcaatgaacgtcatgttgagttacaaatcggctcgtaaaaatgattcgcgaatagttgacgatccgaattttcaacatgtgaacacttctcaggtagccagcgtttcacctgtgagcgttgagcggacgatgcattcggtcagtcgaacgctgctgaccgcggagatgagaaacccggaaatgaggttgaggacaccggaaacggtgttgatcgcgcggttccgcggcgggggccggaaacggtaccgcaaccaaacgcgacagacggccgaagccggaagtgcgacagaggagcccggaagtgaggacgaggcgggaaatgagcgacggtacttccgcccgggggaggccgacggaagcggaaacaggagtgaggcggaggatgctgccagcttcgtcaactgcaccgaggccgagaagtgtctggagcgctccatcaacgataacgaaatcagcaacgggaatgggaatggcaacgctgtcgataatcaggttgaaaaggatggcagtggagaagaggaggatgaggaggaggaggaatggtgggaagacacgggcgagtgtcggttatggagggtcaacacctacgaggacgtgatccggctcacggcagaggtggccctcgaatttggagcccttctctacctcttggccgcgctacgagaggccagctttctcggacttcacatgttcatcgagaaccttatgacagtgccatccagagtgatgttcctgttttcgtgcctcatgatgatgggtgcaccaatattgcgattttcctgtgaagacgaggcggaagacattctggcagttatgataatgttgcttacgtcaccatactttctcttcttttgccggggattcaagacggtcggaccattcgtcgtcatgatctacaggatggtcatgggggatctactccgattcgtttccatctacatggtcttcgtcatgggattctctcaagcctactacatcatatttctatccttcgacaaccctagtacaccagacggagtggacgacacggtgagcaatccaatgccaaacccagttgaggctggaatggccatgttcctcatgtcactcaacactttcggtgactattttagcgcctttgaaaaaaccgaacacgagctagaggctaaggtatgctttgtaatattcatgggtatcgttgccattctactggttaacatgttgattgctatgatgggtaacacttaccaaaaaatcgcagaaacccggaatgagtggcagagacagtgggccagaattgttttggttgttgaaagaggagtcccaccgaaagagcggctaactaaactcatgtggtactcacaacctatgtccgatggcagacgtgcgttggtcttgcgcctcaatcagacggagcaagacaaagaggagatgaaagagattttagagatgaagcgagtgcacaaccgaatcgtggagaagcggcaaaagcgactggcaaagctgtccaacaatgcaagcccctctaacaagcctctagttgacctgccaaacctttcgaaccatgattcccctacaaagcctctcctcgaccttgccagtaacctcagcaaattttgagtctgaccatcctggcaaaatattatctccatccaagcatattttattttaatgacagttaatttcctatttccttcttctttttttgacaaagaatctatttttaagtgaatatacaagatatacactcata

SEQ ID NO: 22 - DNA, 2724 bp, Halyomorpha halys
  nan-Hhal
atgggcaacacggagagcaatgtgaccagtggtgtcaagaagcaagccgatacttcgtccatcaagatctacaagcttgtagacctgaaaggaggaggacttctggtcgaacttatgaaacgcgcagcacagacaaagcaatacgccgaactggaccacgccatcaagaccaaagtagagccgttcttgtacaacaagggccaggggaagatgatgcccgtgagccagctcgtcctcatgaggaacaaggagcggcccaggcacaaaatgttgcctcctttgcgaaacttggagaatcctgatgattatgacatcgaatcctacgttgttccagaaccgacagaagaagatcttaaagatcctaataaataccgagaagtgtgctgggatttgaaggaaagaggagctgttggggagaccatccttcacctctgcctcctcaacgccacatcactccacgcagatctggctaagaggcttctcaggttctacccaaagctcatcaatgacgtatacatgtcagatgaatactatggtgaaagtgtcctgcacattgccattgtcaacgaagacccagcaatggtgaaattcctactagacagcggtgtaaatgtcaatgaacgctgctttgggaactttatgtgccctgaggaccagaaggcatcaagaactgattcatttgatcatgaatgggtcaacttgcaatcatttactacatatgaggggtatgtatattggggagagtacccgctgtcctttgcagcttgcctcggacaagaagaatgttacaggttgatgcttgcgcgaggagctaaccccgacaatcaggacactaatggaaatacagttcttcatatgcttgtcatatattcaaaaatacaaaccttcgacatggcctatgaagttggtggagacctatctataagaaatgtacagtacctaacaccactgacattggcagcaaaattagcaaggattgaactgttcttccacatattaaatatagaaagagaaatttactggcagattggcagtataacttgtgcggcttatccactttcgcaaatcgacacaattgatattgtgactggaaacatcagtaaaaactctgctctgaaccttgtcgtttttggcgaaaaggatgagcatttggaacttatggatggtgttttgatcgatctcttgaacgcgaagtggaatgcttttgttaaatttaggttttatagacagtttttcctattcctattttatttcttgatttcactcatctgtttcaccctccgccctggaccaccaccagtgaaacctatatcgagtatcaacagtaccaagcccaacggaaataacataactgctgatttgtcgccagaaaacctaacaactcttccaaaatggatttataaaacagaaattaaaaaatacgatcccgaagacaacactagtcaaaacagcaggctcaatgtaatattacgtgaagtcattttgacatctttgaaagttgaagatattgataaagtagtttctttttcaaatgcagagacgccagacaattccagggaagatgcggaggggttggtttgcaatggcaattctatccattcctgtataggaaatggctcggacgttatttctgtttttggaaaaggcaaaagtcccaaggttcctaaacctggagcttcagccgacgatttcgattatgatgatacttggtgggaagaattcgggcagtgcaggttacttcaggtcacttcatacattgaaatgacacgcctaatatcagaagtaatgttggacattggagctttgctttacatattagctgctttgagagaagcaagatttcttggctggagcatgtttgtggaaaatttgatgactgcaccttcaagagtgatgtttttattttcttgctgtttgatgctgacaatgccatttttaagatttacctgcaatgaggaaattgaagatatgatggcagtaattataatgctcacgactgctccctattttctgtttttctgcagaggtttcaagactgtcggtccatttgttgtgatgatatacagaatgatcatgggagacttgttgagatttgctacaatatatcttgtttttgtgatgggattcgctcaagcatattatataattttcctgtcatttgataaccctctaacacctgaaggagttgatgattcagtcagcaatcctattccgaacccaatggaagcagtcatggcaatgttctttatgtcaatgacaagttttggcgattattatccagctctagagaggacagctcatgaattttgtgcaaagctttgttttgtgatatacatggcaatagtagcaatcctattggtgaacatgttaattgctatgatggggaacacttatcagaaaattgcggaaaccagaaatgaatggcagagacagtgggccagaatagtgctagtggttgaaagaggagtaagtccttcagagagattaactaagctgatgtggtactcacagcctatgtcagatggaagaagagcattggtgttaaggttaaaccaatcggaggaagacaaagaagaaatgaaagagattctagaaatgaaaagaattcataacagaatggtccagaaaaggaaagaaagagaaatgtccactaccaaaagtccaaatttgataaatctgaacagtccaattgaaaacaccaaaaacaaaaatccatttagttaa

SEQ ID NO: 23 - DNA, 2408 bp, Euschistus heros
  nan-Eher
  misc_feature (304)..(304): y means t/u or c
ctcaggttctaccccaagctcatcaatgacgtctacatgtccgatgaatactatggtgaaagtgtcctgcatattgccatagtcaacgaagatcctgcgatggtgaaattcctactagacagcggtgtcaatgtcaatgaacgctgttttggcaactttatgtgtcctgaggaccagaaggcatcgaggactgattcactcgatcatgaatgggtcaacttgcaatcatttactacttatgaggggtatgtatattggggtgagtacccactatcctttgcggcctgccttggacaggaagaaygctacagattgatgcttgcacgaggagctaatcctgacaatcaggataccaacggaaataccgttcttcatatgctagtcatatactgttacaaactttcgacatggcctatgaagttggtggagacctatcaataagaaatgtccaatatctaacaccattgacattggcagctaaattagctaggattgaactattcttccacatattaaatattgaaagagaaatatactggcagattggcagcataacttgtgcagcttacccactttcacaaatcgatactattgatattgtgactggaaacatcagcaaaaattctgctttaaatcttgtcgtttttggcgaaaaggatgaacatttggaacttatggatggtgtcctgatcgaccttttaaacgcaaaatggaatgcctttgttttaggttttatagacagtttttcttatttctcttttacttcttgatttcgcttatttgtttcactctacgacctggacctccaccagttaaaccaatatcaagtttcaacagtaccaaacccagcggaaataacattactgctgaattgtcgccagaaagcaatgcaactactgttccaaaatggatttacaaaacagaaattaaaaagtatgatcccgaagacaacagtagtcaaaacagcagacttaatgtaatattacgtgaagtcattttgacatctttgaaagttgaagatattgataaagtagtttctttttcaaatgcagagccgcaagacaattccagggaagatgcagatggattggtttgcaatggcgattctgttcattcctgtttaggaaatggatctgatgttgttgctgtatttggggcaagagcccaaaagtaccaaaacctggagcctccgccgatgattttgattatgacgacacttggtgggaagaatttggacaatgcagattacttcaggtcacttcctacattgaaatgacccgccttatatcagaagtcttgttggacatcggagctttgctatacatattagcagcattgagagaagcgagatttctaggatggagcatgtttgtggagaatttgatgactgctccttcaagagttatgtttttgttttcatgctgtttgatgctaacgatgccatttttaagatttacctgcaatgaagaaatagaagacatgatggcagttattataatgctcaccactgctccttattttctgtttttctgcagaggtttcaagaccgttggtccatttgttgtgatgatatataggatgataatgggagacttgttgagatttgctacaatatatcttgtctttgtgatggggtttgctcaagcatattatatcattttcctgtcatttgataacccactgacacccgaaggagtggatgattctgtaagtaatcctattccgaacccaatggaagcagtcatggcaatgttttttatgtcaatgacaagttttggcgattactatccagctttagaaaggacagctcatgaattctgtgctaagctttgttttgtgatatacatggcaatagtagcaattctactggttaatatgttaattgctatgatgggaaatacttatcaaaaaatagctgaaacaagaaatgaatggcagagacagtgggccagaatagtattagtggttgaaagaggagtaagtccatcagagaggttaactaaactaatgtggtactcacagcctatgtcagatggaagaagagcgctggtactgaggctaaaccaatcggaggaagataaagaggaaatgaaagaaattctagagatgaaaagaattcacaacagaatggtacaaaaaaggaaagaaaggggtcgatgaacaaaagcccaaatttgatcaatttaaacagtccggctgaaaatgttaaaaatacaaatcctttcagttaattcagttaacagaacaaagtgaattaaacacaacagaataatcttcttatgaaactatgatatcagcccctgaagtctttgtatcaaatcaagcaccctgtgagcagatgggcaataaacaatatgttttctatggactagccccaaaatagatctattgatttcaatgaaacttgc

SEQ ID NO: 24 - DNA, 2472 bp, Pediculus humanus
  nan-Phum
atgggaaatacagagagtaacgttacgagtggtgtaaaaaaacaagcgggaacatccgaacaaccattgtacaaattagtcggtttaaaaggtggaggtcttttggtcgacatgatgaaaagagcgacacaaacgaaacaatatgctgaattagatcacgcgatcaaaacaaaaattgaaccttttttatataacaaaggaaaaggaagattgatacccatatcacagttggtacttttaagaaactgcgaaagatctagaacaaaattgcttccgcttcttaaaaacatggaagatccagaatctgaatttgacatggatcgtgatggaaatcctggagattttcaaccggctccagatggcgtacaagaagattttcacgattacaataaaaaatatagagacgtttgttgggatttgaaaaaaaggggagccgtgggagaaacatgccttcacctgtgcatgcttaatgccacgtcaatccacgcggatttagctaaaagattattaaaattttatccgaaacttataaatgacatttacatgtcggacgaatattacggtgaaagcgttcttcacgtggcaatagtaaatgaagatcctgccatggttaaatatttactcgatagcggttctaattttcacgaacgttgttttggaaatttcatgtgtccagaagatcaaaaagcaacaagaacggattctctcgatcatgaatatgttaatttatcaacggaaactaattacgaaggatacgtttattggggagaatatccgttaagttttgcagcttgtttgggacaagaagaaagttatcgtttgatgcttgccaagggtgccaatcccgataatcaagatacaaatggcaacactgttttacacatgctcgtcatacataataaattgcccatgtttgacgtggcttatgaagttggcgccaatttatcgttaaaaaatgcaaaatgtctaacgccacttacacttgcggcaaaattagcaagagtcgaacttttttttcatattttaaacatagaaagagaaatttattggcaaatagggagcataacgtgtgcggcatatccgttatcacaaatcgatacgattgatatcgaaaccggaaacataagtaaaaattcagcgttaaatttagtcgttttcggagaaaaagacgaacatttagaactcatggatggagtattggtagatttattagtcgcaaaatggaacacctacgttaaattcagattctacaggcaatttatatctttttttttctattttcttatctctgttatctgttttacacttcgacccggtcctccgacaggaacaacaacaacaacaaacggtatcgtcgttttaaataataataacaacaacataacgtccgttgttgataattcaaataacgttaccaccaccaccgccacaactactgccacgtcatattcttttcctggtcacgtgatagtgacacttttatcgtatgataaatacgaagataaaatacgtataatatcagaattagcgatggaaatcggatctgttttgtatttgttaggagcattgagagaagctaaatttttagggattcacatgtttattgaaaatttgatgacagctccgtcgagagttttatttttaggttcttgttgcataatgcaattcgtaccttggctcaggatcacgtgtaaagaagaaacggaagatatcgttgccgttatcattatgttaacgacggctccatattttttatttttttgcagaaaaatgaacgaccccgtttttctttttcttttttttttaataaaaaaaattttttttctaattttttttttttttttttttacaaagccaacttattatataatattcctttcgtttgataatccaaaaactcccgatggagtcgacgattctggaacaaatccaatgcaaagcccagttgaatccataatggcaatgtttttaatgtctctgacaaattttggagaatattacggtgcattcgaaaagactgaacacgaatttgttgcaaagttaatgtttgtcgtttacatggctatcgttgctatattactcgttaacatgttgatcgccatgatgggtaatacgtatcaaaaaatagcagaaacgagaaacgaatggcaaagacaatgggcaagaattgttttggttgttgaaagaggtgtgagtcctcaagaaaggttaaaaaaattaatgctttattctcagcctatgtctgacggaagaagagcattagttttacgattgcatcaaacgccagaagacaaagaagaaatgaaagaaatattagatatgaaaagaatacacaatagaacggttcaaaggcgaaaagctaaagaaaataaaaatgtcacgtttgctggtacccctaaaaatggcattaaaaatcgtttgctcggtcccgttcccccattaaaaagcataccgtcaaaacctaaaatttaa

SEQ ID NO: 25 - DNA, 2970 bp, Bombyx mori
  nan-Bmor
ttgtagttcttacaattatgggtaacacagagagtaatgtgacgagcggtgtgaagaagcaagctgggacgtcagagcaaaagctttacaaactagtcgatataaaaggaggaggtctcctggtggacatgatgaagcgagctctgcagaacaagcaatacgccgagatagatcacgctatcaagactaaagttgagccgtttttgtataatagagggaggggtcgatatataccgatatcccatctcgtcttgctcaggaacaaagagagaccgagacacaaactgctgcctccactcagaggcatggaaaaccctgacgaggaatttgacgtggataaggactggccagttgttactcaagaggaatatgacgctaatccctccggatacagggaactttgttgggatgtcaaagagagaggtgcagtgggtgagactattctgcacttgtgtctgctcaatgcgacttcgctcctagctcatctcgctaaaagactactacgcttttatcctaaaatgattaatgatatttatatcagcgatgaatactatggtgaaactgtattacatattacaatagtcaacgaagatccgacaatggcaaagtttctactggacgcgggtgcggattaccacgagcgttgctacgggaacttcatgtgtcctgaggatcaaaaggcttccaggacggactctttcgatcacgaatgggtcaacgtccagcctgacactaattataatgggtacgtctactggggcgagtacccgttgagtttcgcagcatgcttaggccaggaggagtgctaccgtttgatcttagcacgaggagcggatcctgataagcaggatactaatggcaatacagttctgcacatgctagtcatatacgagaagatgagcacattcgatatggcttacgaagtgggcgcgtccctaaacattcgtaacgtacaaaacctaactcccctaacccttgccgccaagctagctcgcaccgagatgttctttcacattctaaacatcgaaagggagatttactggcagatcggcgccaccacatgcgccgcctaccctttaggacaagttgatacaatagacactgaaacaggactaattagtaaggattcagctctgaatttggttgtttttggggaaaaagatgagcatttaggtctactagaaggtatgctgatagacttattgaaaacgaaatggaacacgttcgttaagtttcgtttctacaggcagttcatattattttcatgttacttcttggtttcactgatctgcttcacattgagaccaggaccaccggacagagcattgaatacaactgtcttgaactcaactattggtccaaacgttaccgacgccgagctggtatcggatgtcgaagccaatcgaagtgtttttggttttccagaaaattgcacaatgaccccgaacgcagattttgatacgaatgctgttgaagtcctgaacggtactaagttcggcggttctcattgtgcacgattcaaaagtcaccccaaagaaaaatcgactgaagcacccagggagaatgacgttgaaggttggtgggaagacttgacagaggaatgcaggttgatgaacttggacacgtggcaagccaaactaaggatatctgcagagcttctgttgtggatgggggctttggcttatttcggagctgcgttacgtgaagcaaagttcctcgggatcaaaatgtttatagagaatctgagcactgtgccatccagggtgatgttcttgttttcgtgtctgctgatgttgatactgccaactttgaggttatggtgcgctgacgaggcggaggaccatctcgctgtcatgatcatgctcactactgctccttacttcttgttcttttgcaggggtttcaaaacagtgggtccattcgtggtcatgatataccgcatggtgatgggtgacctgctacgtttcgtttgtatatatttggtattcgttatgggattctcacaagcgtactacgttatattcttatcattcgacaatcccaacacgcctgaaggcgttgatgactcggtgtccaacccaatgccctcccccatggagagcatcatggcgatgttcctaatgtctctaacgtcgttctcagattactataccgcgttcgatcgcaccgaccacgaaatagaggcaaagctcctcttcgtgatatatatgataatagtagcgattctcctggtgaacatgttgattgccatgatggggaacacttaccagaagatagcggagacgaggaacgaatggcagcggcagtgggcccggatagtgctggtggtggagcgaggagttccaccggcgcagagattaaagcagctgatgacgtacagtcagcctatggccaatggaaagagagctttagtcttgagaatcaatcaaaaggacgaagacaaggaagagatgaaagagattttggaaatgaagagaactcacgagcgcattgtagctaagaggaagcaacgggaggcgcttaagcctggcgagatcccgccacccgccagagattatcctattaggaaatgaatcttagtttggagataataatttattgcttacaacaaaaagtcagtggaacgaggagtggcggaggagtgatttggttaccgaagaccataaacataatgaatgctgctactttgagacatgcgatatgaggtcatactggacatagcataaaggctgctacaaaaattggtacctgcttgccggatttgaatgcaaacatagtctcatcgcgtgagaatctacaccggaactaatgcactttagatcacaatgagttcgtatctataagctccaaaaatcgcttaaaattgctaaaacatgcttagcttttattttgtattcgaataaggattccgtgaacgtgtgtcacaatattttagagccttttttatctacgtaaaagaaaaattcactc

SEQ ID NO: 26 - DNA, 2726 bp, Vanessa tameamea
  nan-Vtam
cctatatatgtagcgcaatattatgaataacgacttatttttacctaatataatatagattattttgagttatattcgaagttaagtgtaaatttgtttgaaaatgggaaatactgaaagcaacgttaccagtggtgtaaaaaagcaggccggaacatctgaacagaaaatttataagcttattgatattaaagggggaggactgttggttgatatgatgaaaagagctgtacagaataaacagtacgcggaaatagatcatgcgatcaaaacaaaagtagaaccatttctctacaataaaggaaaaggccgttacataccaatatcgcatattgtcttgttgagaaataaggaacgaccgcgacataaattgttacctccattacgtggtatggagaatccagacgaagagttcgatgttgagaaagactggccagtggttactcaagaagaatatgacgttaatccttcaggttacagagaactgtgctgggatcttaaggaacgaggagcagtcggagagacaatactccatctgtgtcttttaaacgcaacttctcttttagcggatttggcgaagagattattgcgtttttatccgaagttgatcaatgatatatacatgagcgatgaatattacggtgaaagtgtcctccacatgaccattgttaatgaggatcccacaatggtcaagttcctgttggacgctggagcggactaccatgaacgttgttttggtaatttcatgtgtcctgaagaccagaaggcatctagaacagactcatttgatcatgaatgggttaatgtacaaccagaaactaattatgatgggtacgtgtattggggcgaatacccattaagtttcgcagcctgtcttggtcaggaggaatgctatcgtctaatcttagcacgaggagcgaatccagataaacaggatacaaacggcaacacagttcttcacatgctgatcatttatgataaaataagtacattcgacatggcttacgaagttggagcgtctttaaacatacgcaacgtccaaaacctgacccctctaacactaaccgcaaagctggcgcgcgtggaactctttttccatatattgaacatcgaaagagaaatctattggcaaatcggtgctacgacttgcgctgcatatcctttaggacaagtcgatactattgatacggaaacaggattaatcagtaaagattcagcattgaatttagttgtatttggggagaaggacgagcatttagaactattggagggtatgttaatagacctgttgaagacaaaatggaatacattcgtcaagtttcgcttctatcgtcaattcattttattttccttctacttcgttatttccctcgtttgtttcactttacgaccgggaccgcccgatagagccctaaatgctactgctgtaaatacaactacgggaccagtgaatgatacagagttagtttctgatgtcgaaaactgtactttaccgcaggctggtatagaatttgatccaggaactgtcgaagtcttcaatgggtcgaagccaggcgttcaatgcgcccgattcaaaagtcatccaaaagataaggagaaacctacagctccgagagagaatgacatggaaggctggtgggaggatttaactgaagagtgtagattaatgaattttgatacttggcatgcgaaattgcgtataagtgctgagctaatattgtgggttggtgctctagcatatatagcagcagcattacgagaagcgaggtttttgggaataaaaatgttcatcgagaatttaagtactgttccttcaagagtgatgtttctattttcatgtctactaatggtttgtctaccaacattacgtctgtggtgcgccgatgaggaagaggatcatctcgctgttataattatgttaacaactgctccttatttcttgtttttctgtcggggcttcaaaacggttggtccgttcgtagtcatgatctataggatggtgatgggtgacctattacgctttgtctgcatatatcttgtcttcgttatgggattttcacaagcatattacgtgatattcttatcattcgataatcccaatacgccggagggcgtggacgactcggtatcaaaccccatgccctcgcctatggagagcatcatggcgatgttcctaatgtctctcacatccttctcggactattatggtgcttttgatagaacggaccatgaaattgccgcaaagcttctgttcgtaatctacatgataatagtggcaattttgctcgtgaacatgttgattgccatgatgggtaatacgtatcagaagatagcggagacccgcaacgaatggcagagacaatgggctcggatcgtattggtggtcgagcgaggggtaccaccggcgcagaggcttaagcaacttttggcatacagtcagccaatggcgaacggaaagagggctttagtactgaggattaatcagaaggacgaggataaagaagaaatgaaagaaatcttagaaatgaagcggacacatgaacgtgttgtggcgaagaggaagcagcgggaggcggaaatgaaagggggcaagggaagactcccaccaccgcccgttagagattaccccactacaaagaatcagaaggtcgcaattaaaaaaatgtagaataaagttttattcgattgacttgatatgtaacactattttcaaataataaataatt

SEQ ID NO: 27 - DNA, 1068 bp, Danaus plexippus
  nan-Dple
atgctggagtcaggaggtggtttacttgtggacatgatgaagagggcggttcagaataagcagtacgctgagatagaccacgctatcaagactaaggtggagccctttctctacaataagggcaagggcaggcatatccctatatcgcatcttgtgctgttgaggaataaggaacgagggaggcataaattgctgccaccgttacgtggcatggagaatcctgacgaagagtttgatgtagagaaggattggccagttgtgacccaggaagaatacgaggcgaatccctcggcttacagggagctttgctgggacctgaaggaacgcggtgccgtcggtgagacaatccttcacctttgtcttctaaacgctacctcacttttagctgatttagccaagagattgcttcgtttttacccaaaacttataaacgacatttacatgagcgacgagtattacggtgagagcgtacttcatatgactattgtaaacgaggacccgactatggtgaaatttcttttggattccggagctgattatcatgaacgttgcttcgggaacttcatgtgtcctgaggatcagaaggcctcccgaacagattccttcgaccacgagtgggtcaacgtccagccggacaccaactatgacgggtacgtatattggggggaataccctttaagtttcgcggcctgtctcggtcaggaggagtgctacaggctcatactggcaagaggagcgaaccccgacaaacaggacaccaatggcaacaccgtactgcatatgctgatcatttatgataaaataagcacattcgatatggcgtatgaagttggtgcatccctaaacatcaggaacgttcagaacctaacaccgctcaccctggccgctaaactggcgagagttgagctgttcttccatatcctgaacattgaaagggagatctattggcaaatcggagccaccacctgtgcagcgtatcctctgggacaagttgacactattgacaccgagaccggaaggattagtaaagattcggcgctgaatttagttgtatttggggttagttag

SEQ ID NO: 28 - DNA, 5914 bp, Acromyrmex echinatior
  wtrw-Aech
gacgattatcaacgttctctaccgcgcttcatctcatgtcgcaaatgcgtaattgaacttaatacggcaacaggtggagatagttgatagtttcagcaaatttatatcgttctcgtcagaaaaagatggaggaaactgaagaaagagtaccaaaaactgttccaaatatgttgacacgcacgaatacggcttccttgtttctaactcggctaaaggctaaacgctcatcgtctaagcaagatgagcttgaaagtggtcgagttcaatatgaaccgtcattacctgatgactcgataagtccttccatggaagattacttcatcatcagtgaacataccacttccgatgaaatcgaccgtacttcactacgcatcaatgaagatcttattaaaaatattcttacagaacacaaaaggcatatgggttataaatcacaaatcttggagaatctagaatcaggcaaaatggatgaaataaacataaatacgatctttgcagacatcaagtctaatgaaatcgatattttattgctacaagcgagttttttaggtcgtatgaatctcattcatcatttgtgcaaatgtggagctaatattaattacaccgaacctaatcatggtcttacccccttgcatttatgtgcctttcggaattgtctggatggagtcaaatatttgatagaacaaggcgcgagcattgataccaaatcgaagcacacggcatttcattatgccgcttttggagatgccttcgacgtagctcagtatttcatgcaacgagatatcagtcagctatctccgtatgaagctgaagaaactgtattgcatgtggcttcacggactgacgccttgcgcgtactttctttactggcaccgaacaataaagaattgaatcgtttggatcaggacggatacgctgctattcatcatgcagccaatggcggagacaaagtttgtttggatatacttctgaaagccggttgtcaagtggatttacttaccagaaagaacgacactgctttgcacttggctgcggaagttggttgcgtgagtaacttgactcttttggtcaaggcaaacgctaatcttcagctgaagaatcatcgaggatacacggccttgcatttagccgctcgttcgcattctctggaatgcgtggagattttattgaaaggtcgcgcggatcctaatgtggaagataacgagggtcgaacatctttgcatctggctctaggtaagtctctgatgaccgacgacattactgagctgctgctgaaatggcgggcgaatgtaaataaggcagacatgtacggttatacgcctctacacatcgctgcatcgaacgagctatcacgatgcgtgaatctattgataaaacacgaagcagacctcagtgccaggaccatcggtggtaacagtgccctatccatcgttctgcgtaagaccccgacatccctggacgtgttcgaacgtagactggacaagtctctaactttgagccgacagggattcatcgcaggcaagctcgagttacaactggacttccgtccgttgcttcaacatcggcggaaccgttcgtccgagaccggttatctgaatacctttgtgaaggaaggctacaaggaaattctggaacatcctttgtgccagtctttccttcatctcaagtggcataagatccgaaagtattacatcgcccgattgcttttctatctgatatatgtgttgatccttacaagctgggtaatagccgccctcgctcataattgttacaatgaatcaaaaggttattacatgcacaataaaccgttgtgctcgagcgcaactgggatttatggatttttttatagacatcctacactactcgagattcactggtacgcgctgatgatgctcaccatactcgaggcttgtcgcaagttcgccgttatttccagttaccgatctgttagacaatttttcacgcaggtggagaatctagtcgactggtgcgtgatattgagtgtgtttgccacctctttcgtgtatacgggaaaaacatatgtctggcaaagacacttaggcgccttcgccgtactttgtggttggagcaatctgatgctgatgattggacagcttcctgtgttcggtgcttacgtcgccatgtttactagtgtgcaggcacaagtgtttaagttacttttggcctacgcctgtctgctagtgggctttacggcgagcttctgtgtgatctttccatattccaattcattcagcagtccgcacataggtcttattaaggtcctcgcaatgatgaccggcgatttaggctttgattcttacttaatctcatctgataagagtggcatctacgagaataatgaaggagcttcctggattttgctacaaatttcggcccaactctttttcgtgttattccttctatttgtcacgatcgtgctgatgaatttattgattggtatagccgtgcacgatatcaagggtcttcaaaaaacggcgggtcttgcaaaactcgttcgccaaacaaaattgatccacgacgttgagattgcaattttcctaggatttatgccgtcgaaacgcttcatcaaatgcatgcgatggaccacgctactcctgccatcacctttacgagccgttttgactgttcgtccactaagtcccagagagaagagattaccacgtgatgttctttcggctgcttacaaaatagccaaggaaagagatagacagaataattacatcgcgtcacgcagaaaaatttatagcgcaaaagcgggtttcaaaggcgacatgaccatgtatcgtcgtcgtgatttcaacgaggatacgctgcaacacaattgtgacaaatttaaagacgaaatcgcggaagtcaaggagatttgcgagaaaaatcatactctccttcaggaactcataaaagctcataaattaaataaacgtcttgcccctctgctcgtaaattcctcttcccacacgaatggcagaggcgtatgcagagtacgtcatgcagtacgtgtagtgcgatcgtacaaactagttaagctcgctgtaatgctcgctgaattgtcaattgtacactggtcaatgataggcatcttgaatcgaattcaaacgagtatgtatgagaacgatcgagattcgttaggagaaagtgccaaagtaaaaaatctcgagacgaacaatctggaaacaccaactattttgaatgatgaggaacatttttattccaaaagcttcaacaaaagttgtcacaaaagcgatcctctgtccgtaagattaactcccacttatagatcattgagatatgcatatgcagaggattatccgcaaaaaattgtgatcgatgatgcaaccatattcgataacgatcaaatcgagatcgacgcaggtgtaccaccaccagtcgatgactctctcttctttgacaatctggaaattctggaatgtcacaagaatcattacgtgaatggtgccaaattgagatcggctatatggtctatcgtcgacacgatggagacgagattattacagtacatggaaaagagtcgcacgcttccgaacgcgtgcaaaagcgagaatctacgaaacgttgcttacatctgggcgtcctatcgtggtctgcttcatcttctgccggaattggagaatgccggagcacgttacgactacgtcgaaccgcggaccggtgtgaacgctatcctcgcggcttcgttgggtgacaaagtcgcctgcgtggagtatctgatcgcgaagggtgccaacgtgaattacgagagccccatcattcattacacacctcttcatttcgcagcgctcggtaatagctggcacgccgcagctacattactggatcatggcgccaagctcaattatgtctgtcaggaagtggtcgagccaattctacatagtgccatccgcgcgaaggcggtggagacagtgaagctgctgctcgagcgtggtgccagtgttgtcgaaaagaatcatttgggccagacaccgttgcacgtggcctgtttcgtacaatcgataccatgcgtcgagctactttcagccagcgcgcccaacgtgaacgctgtggatagggagcacagaacacccctgcatttcgccgtgatgagcacagactcatccgccgagttagtacagttgttgctgaaatgcggcgctttgataaatgcggccgatcggacaggtttcacgcctcttcacattgccgcactgaacgaacaatctcaatgtgtggatgcgctcatctgggcgggtgctgacatcagcgcgaccacgtgcactggattatccgctctgaatattatattgaagaaaattcctgagtctctgcacgtgttccgacagcggttggacgcttccattagactgacccgaccggtatcacataatcgtgagtttgaaatgagactgcacttcgacattctcttccccagcggtaatcagtgcgaaaccagcttcataaatacttttgtacaagagcgtcgaaaggatttgttgtcgcatcctctagttatggccttcctacacctcaaatgggagaaaattcgcaaactctatttgctgagaatatttttgtattctatgacagtgatatgcttgactacttacgtactgactgcgttagcgtataaatgttataatcaaaacgaaaccaatagctccaagatatgcggcagtagacgaccgtctgactttttcttccgaaaatcaatcatcgagattgaatggtaccttgcgctggttctgacatgcatcaccataccaagaaaaatatatggcttcatggtttacaaatcagcattacagtatttttccagcattgacaacgtgttggacggtgtagtaattgtgagtgtattcgttacatccttcgtgtatactgggcgtacttacgactggcagaattacgtcggcgcgtttgccgttctttgcgcctggaccaatctaatgctgatggtgggtcaattaccggccttcggtacctatgttgctatgtttacgcacatccagttcgagttcgccaaacttttgttagcatattcgggcctgctgattggtttcactatcagcttctgtgtgatattcgccagcgaacccgcgttcggcaatcctttcactgggttgatcaaagtcttggctatgatggtcggtgaattggacttcgaaggattcattaaccagatggatgataaaccgatgggcggctcttttgtcatttatcatcctattttatcagtgtgttcgcagattctcttcacgctctttatagtattcgttactgtgattctgatgaacttgctggttggtatcgccgtacatgatatacaaggtctgaggaatcatgcagggcttacgaagctagtaaggcaaacgaaaatgatcctctttacggaaatggtattgcacaacactgcaatcccatatgccttccggaaatggatgtcggatcacaagattgatgttgaaaacaggaaacgggttcttgtggtaaaaccgcttaatcccctcgagaaacgattgcctaaggatataatgaaagccgcttatgagatagcacagaagaatattccttcgtttatgaatgatgatatcaatttgagcgatcgtgctgtttggttgaaacaacgacacaatggattctccgacggagctctagaaatgacatttgagaaactgattgctatgatgaaagtgaatgaagatgctataaaattgttgagaatacagttgctagaaatgaacaagatgttggaaaacgtcgcaacaaaattgacgaaagaagaacatactacttcattataattttaataatttaatattgattatatttccattacttcttacaaatatgactgataaagtagatatcgaagccacagttaatggtggagggcctactg

SEQ ID NO: 29 - DNA, 3310 bp, Apis florea
  wtrw-Aflo
aacaaagatgagaaaatctatattataataaaatgaaatgagcttatgcgatttgttgatatttctgatgtataatttattgtgatcttcgcgatctcgaaacatacaatgcgtgtaagaagctcgattccagctcagtattaatcgagtcgtccgatagtacgacaggtttaaagtgttgtaatcataacattgacacgttgaacagtacggattgtttgtttaatcaaattgattggattcgcacgtggaaaaatcgttagtaatcgattttttattgtacattatctaaattaccgatcaatgatgtaatcgagtaaagcggtagccgagaaggatagagacgaatcattcgcagaccttgaatacgccaacaactaaaaagaaagtacaaagaggataggaacgtggatatggagaacgtaacggtatccattccaagtactccaaagcgtacgaccatgacctctttgctcctaacacgatggttggcgtcgaaaagttcgactcgtacgaatgcagagacaagttggtcctccgacgatcgaagtttagaatacggcacaccgccacccatagaagagccgcattgttattccatgtgtgccagcgaaagctcttgcacggaggaaattaattgcacgttgcaggtgaacaaggatataattaggaatctgttagtagagcatatgagacacatcggcggtcgattgcaacttctcgatgatttggaagaaaataaaatggacctaaacaatctcgagaatttcgcgaaattgtataaacaacacgagataaacgctttattacttcactccagcttcttaggtcatgtcgacgcgattaaaagtttgcacgaatgcggagcggatttgaatcactcggaacagggacaaggcctaactccgctgcacttgtgcgcgttcagtaattgtttggaaggggtacaatatctgctcgataacggagccaatattcatctggaacgaactcatacaccctttcattatgccgcttttggaaatgcctgtaaagtaactcaatatttcctccaattaggtatcagtcaggaatcttgttacggagaggaaactgtgttacacagtgcggccaggtcagatgcttacaacgtgttaaaattattggcacctaataatcctactttggataatttagattgtaatggatacgctgccatacatcacgtagcagacagaggagattcaagttgcctaatgatattactagacgcaggttgcaaactagatttaacgaccaagaagaatgacactgcgctgcatcttgcagctgctgccagttgcgtggagaacgttgatttgttggtagaaagaggcgcgaatgtccatttgagaaatcacagagatcaaacggctctgcacatagcagctcgttcccattctttggaatgtgtggagatattgctaaagaaaggtggatgcgatcctaatattgaagacaatgacggaagaacgtctctgcacctcgctttaggtagatcattgttagcctatgacgtgacggaatttttgatcacgtggaaagcaaacgtgaataaaaccgacaaatacggttacacaccgcttcatatagctgctttaaacgaattatctcaatgcgtggatatcttgatccaacacggagcggatcttagtgctagaacgaaaggtggaactagtgcattgtccattatcttacgtaaaacaccgacgtctttaaatgtctttaagcagagattagatgcatcgataacgcttcatcagcatggatcggcaactggagaggcggagcttcgtctcgatttccatcctttgcttatgaatcaacaacaaggcgaaataagatatcttggaacgttcgtgaaggaaggatacaaagaaatattggagcatccgctttgccaggcattcctccatctaaagtggcagaaaattcggaaatattatgtgggcaggctgatcttttacctgttttacgttctcatattaacaggatgggtaatgaccgctctggcgcataattgttacaacgagtcgcatggccaattagacaacgatcagccaccattgtgcgcgaacaccaccggtatcaatggttttctttacagacatccagcattactcgaggtcgaatggtacgcattgatggtgctcacgattctcgaagtattccgcaaattgaccagcattccaacgtatccctccgttcgccaattcttcacacaagccgaaaacatggtcgaatggtgtgtgatattgagcgtgttcgccacttcttttatctacacgggtagaacgtatccgtggcagagtcacgtaggagcattcgcggtgctctgcggttggagtaatcttatgttaatgatagggcaattgccaatattcggagcatatgtggctatgttcaccagcgttcaagcacaagtattcaagcttttgttggcgtacgcctgcctcctggtagggttcacagcgagcttctgcgtgatttttccacgatcgaaatcgttcagcagccctcacatcggcctgatcaaagttttggtcatgatgaccggagagttaaatttcgaggatctgttcttccctcgtgaagaggacgggaaaacgatcgactcggggagtacatcttggattttgttacaagtttccgcccagttgtcgttcgtcctgtttcttttattcgtcacgatcgtgttgatgaacttgctggtaggaatcgcggttcacgatataaagggactacaaaaaacggcaggacttgcaaaactcgttcgccagacgaagcttatctgcgacgtcgagacggcactttttttgggtctgatgccaaaaagattaatgaaatttttacgatggaccgctctgctgctaccatcacctttgagagccgttttaaccgttcgtcccctgaatccgagagagagtagactgcctcgcgatttgttagccgcggcgcacaaggtcgctaaggaaagaaaaaattgtatatctggaactttgtacagtagaaagagcaataccaccatgtatacgtgtttgaaaagcgagccgtattcgacttttcgtcgacgttttccagaagaagatatttccacggtcgatgattacgcgattaagggagaattggcagaattgaaaaagatttgcgaaagaaatcatcaacttcttcaggacattgtgttgatgttggtgaatgataagcgcgaataaagaacaggatgagaataattaagtttaatctggaaattcttcgaatcataatctcttggaaatagcaaggacataaatga

SEQ ID NO: 30 - DNA, 7086 bp, Apis mellifera
  wtrw-Amel1
aacgtggatatggagaacgtaacggtatccattccgagtactccaaagcgtacgaccatgacctctttgctcctaacacgatggttgacgtcgaaaagctcgactcgtacgaatccggagacaagttggtcctccgacgatcgaagtttagaatacggcacaccgccacccatagaagagccccattgttactccatgtgcgcaagcgaaagttcttgcacggaggaaattaattgcacgttgcaggtgaacaaggatataattaagaatctgttggtagagcatatgaggcacataggcggtcgattgcaacttctcgacgatctggaagaaaataaaatggatctaaagaatacggagaatttcgcgaaattgtacaagcaacacgagataaacgctttgttacttcactccagcttcttaggtcatgtcgacgcgattaaaagtttgcacaaatgcggggcggatttgaatcactctgaacaaggacaaggcttaactccgttgcacttgtgcgcgttcagtaattgtttggaaggagtgcaatatctgctcgataacggagccaatattcatctggaacgaactcacacgccctttcattatgccgcttttgggaacgcttgtaaagtagcacagtatttccttcaattaggtatcagtcaggaatcttgttacggggaggagactgtgttacacagcgcggccaggtcggatgcttacaacgtgttaaagttattggcgcctaataatcctactttggataatttagattgtaatggatacgctgccatacaccacgtagcagacagaggagatccaagttgcctaacggtattactagacgcaggttgcaaactagatttaacgaccaagaagaatgacaccgcgctgcatcttgcagctgctgccagttgcgtggagaacgttgacttgttggtggaaagaggggcgaacgttcatctgagaaatcacagagatcaaacagccctgcacatagctgctcgttcccattccttggaatgcgtggagatactgttaaagaaaggtggatgcgatcccaatattgaagacagcgacggaagaacgcctctgcacctcgctttaggtagatcattgttagcctatgacgtgacggaatttttgatcacgtggaaagcaaacgtgaataaaacggacaaatacggttacacgccgcttcatatcgctgctttaaacgaattatctcaatgcgtggatatcttgatccaacacggagctgatcttagcgctagaacgaaaggtggaactagtgcgttgtccattatcttacgtaaaacgccgacgtctttgaacgtcttcaagcagagattagacgcgtcgatcacgcttcaccagcatgggtcggcaactggggaggcggagcttcgtctcgatttccatcctctgctcatgaaccaacaacaaggcgaaataagatatcttggaacgttcgtgaaggaaggatacaaagagatattggaacatccactctgccaggcattcctccatctgaagtggcagaaaattcgaaaatattacgtgggcaggctgatcttttacctgttctacgttctcatattaacaggatgggtaatgacagctctggcgcacaactgttacaacgagtctcatggccaattggacaacggtcagccaccgttgtgcgcgaacacaaccggtatcaatggttttctttacagacatccagccttactcgaggttgaatggtacgcattgatggtgctcacgattctcgaagtattccgcaaattgaccagcatcccaacgtatccctccgttcgccaattcttcacgcaagccgaaaacatggtcgaatggtgtgtgatattgagcgtgttcgccacttcttttatctacacgggtagaacgtatccgtggcagagtcacgtaggagcattcgcggtgctctgcggttggagcaaccttatgctaatgatagggcaattgccaatattcggagcgtacgtggctatgttcaccagcgttcaagcacaagtgttcaaacttttgttggcgtacgcctgcctcctggtagggttcacggcgagcttctgcgtgatctttccacgatcgaaatcgttcagcagcccccacatcggcctgatcaaggttctggtgatgatgacaggagagttaaattttgaggatctgttctttcctcacgaagaggacgggaaaacgatcgactcggggagcacgtcttggatcttgttgcaagtttccgcccagttgtcgttcgtcctattccttttattcgtcacgatcgtgttgatgaacttgcttgtaggaatcgcggttcacgatataaagggactacaaaaaacggcaggacttgcaaaactcgttcgccagacgaagcttatctgcgacgtcgagacggcactttttttgggtctgatgccaaaaagattgatgaaatttttacgatggaccgctctgctgctaccatcacctttgagagctgttttaaccgttcgtcccctgaatccgagagagagtagactgcctcgcgatttgttagcaacggcgcacaaggtcgccaaggaaagaaaaaattgtatatctggaactttgtacaatagaaagaggaacgccgtgtacgcgtgtttgaaaagcgagccatacttgacttttcgtcgaaatttcccggaagaagaaatttccacgatcgatgattacgcgattaagggagaattggcagaattgaaaaagatttgcgagagaaatcatcaacttcttcaggatatcgtgttgatgttggtgaatgataagcgcgaacgattggaacgttctttcgaggtgatccacgatagtagagagtgttacgtcgcagtttcttcatcatccttgttcacggacgaatttcttgggcgagagataatggacgataaacagatacacgagaactccaccgacataccgaaggctagcttgcaacttccgacaattacggttggcaacgaaagaccgcggcgttactcgttaaccagtttaaaagatcgtcgtctcccgtttgaaaatgaaaacgattgcgggagggcggtagaaggagaagttgaagcgcatgaaaatgtcgacaaaacgtggcaaatgaaaatgaagccgctcgccaatcatgagaaaagaaccagacattattccctgactagatcaaaaaatcgtcgttcctgcctgtacacggatgaagacagaaatttcttgaccaagtctgttgtgaacgagacagtcaacgataaaacgacgcaaacgttaagagtaccgttgtcccgtgaaggaagaacgatacactgttcgttgtcgaatctcaacgatccgtcgaacgatcttctgtccaccagattgacttctacctttagatccgtcagatatcgtcaatcgagcaattcggagaagatagcgatcgatgatattcctccggcagattcctcgaacgatcacgtggaaatcgacgccggcacgcctccaccggttgacgaatctctcttctacgacaatcttgacgtattcaggcaagcgcagatcaacagcaacgatctcagatcgatcatgtggtcgatcgtcactacggctgaaatgaaaatattacttcaattagaaaagtgtaacgcgttgccggagataccggcaggagaacgaataagaaatatagcgtacatgtggtgctgttatcgcaatttggcgcatctattaccaaaattggaacaatcaggcgtgaaattggattacgtggagcctagcacgggcatgaacgcgatcctagccgcgtcgttaagtggtagcgtggcttgcatcgagcatctgataaagagaggcgtcgatatcaattaccggaatccgatcaatcattacacgcctcttcacttcgctatcctaggaaattcgcctgacacggcccggatactgctcgataacggtgcaaagccgagcacgtatctttaccaggaggtggccgaaccagttttgcattgcgctatcagagcaggggctgtggaaatagtaaaattattattggaacgaggagcaagcgtcgtcgagaaaaaccatatgggcgagacgccgctccacgtagcttgtttcgttcaatcgataaaatgcgtcgaattacttctagattcgcccggtaccaatgtcaacgcagttgatcgggcacacagaaccccacttcatttcgccgtgatgaccacttactcctccgcgaagctcgtagaacttttgttaaaacacggtgccctggtgaacgcggcggacaaaactggcttcaccccccttcacgtggcggcattaaacgaacaatctcattgcgtggacgtattaatttgggccggtgcggacgtcagtgcgaccaccagcgcgggactttccgctttgaacattattctcagaaagataccggattcccttcaagtgtttcggcaaagattggacgcctcgataacgctcagaagacccgtgcctcacaacagagagttcgagatgagattgcacttcgatttactctttcccagcgggaatcaatgcgagaccagtttcatcaacactttcgttcaggaacggcgtaaagatttgctctcccatccgttggtaatggctttcctgcatctgaaatgggagaagattagaaaattttatctgctcagaattctggtttacgctatgaccgtgatctgtatgaccacgtacgtactcaccgcgctagcttacaagtgttacaaccacgacgaggcgaacagctcgaaaatttgcagcagcaaacgtatctctggattcttattcaggcgaccggtgatcgaaattcaatggtatcttttattaatattcacttgtatctctattcctaggaagatattcggtttcatggtatacacgtccgcgaagcaatacttctcgaatatcgacaatgtgttggatggtgttgttataatcagcgttttcgtcacgtcattcgtttacacgggacgcacatacgattggcaaaattacgtcggagcatttgcgatactgtgcgcttggacaaacctgatgctgatggttggtcaattaccggcttttggcacgtacgtggcgatgttcactcacatacaattcgaatttgctaagctgctgcttgcttattccggattgctgataggtttcactatcagtttttgcgtcattttcgtcggagaaccatccttcggtaatcctttcacgggactcatcaaagtattggcaatgatggccggagaattggacttcgaagggcttatcacgcaaatcgatcaaggattggaatccgacggaccttttgttatttatcatccgttatcggtatgctcacagatcctgttcactctgttcatcgtgtttgttacggttatattgatgaacttgctggttggaatagctgttcacgacattcaaggtttaagaaatcacgccggtctcacgaaacttgtacgccaaacaaaattgatactatttacggaaatggtcttgcacaacagttcgattccgtacgcttttcgaaaatggatgtccgatcataagattaacgtggagaatagaaggagagtcttagtggtgaaaccgttgaaccctttggagaaaagattacccaaagatattctgaaggctgcttatgaaatagcacagaaaaatataccgttcatgaacgacgaaaacattaatttgagcgatcacgtaataaaaatgcgacaacatagcgaggaatatttcgactcgaatttgcaattggttatcgagaatttagcaaacaaactacaatcttacgaagatatgatcaaatcgttgaaagaacaattgttagatactaataaaatgctggagagtgttgtgaaaaatctggcaaaggaaaagaatattgatattgaagcaaatgttactggtggggggtcttctggacaagctggtgttatacgattaggtatttcattagggcttcgaagctttgtcgataatgacatgatagaaagaatgaaacttggtttagcaatatttagagaactaaattctactataatatttttattatctatgagtagtggtggtttttgtgattttgtgaaatataataaaaatatggaaaatcaaattcattctgaactaattataaaagaagaagaggaagaagaagaagaaaaagaacaaaaatgtgaaactaaaaatattgtttgtgatggggaatcaacaattggtatcagaccaagaccattaatttgtaaaccagaaaatgtaaatattggatgtaaatccgaacctatagaaaccaagtggcattgggctccaggagcatggcaagatgctacaagaactagtgcttttcaaccatataagcctcctactatacttactaatttacaaagaggtaatacccaaacagaaatacctcaactttatagtggtagtgatattacatttcatacattagctggtcaaggtgaacttacacctgaacatatacatccaaatactatagacacacctgatgaaaaaggtttaactggtcttatgtgggctgcgggatatggacaattaggtagtgcacggcaattacttaaagctggtgctaataagaattaccgtggtcttaatggagaaacacctttgcatttagcagctgcttatggacaccatgatcttgtaaaattattattaaatcatgatgcagattcgaatgcaagtgatgaggaaggaaatacacctttaatatatggagcatatggtgatcatccacatgtatgttatgaattattatccagaggtgctgatataacacatcgtaatatgtacaatataagtgcttatcatgcagcaatattaaataattcattaactgctaaagcagttattgaaaattatttgatacaacaagtgataaatataccaccagatatattgcaataaaataatataatgcaaataatataaaaatgattttttaatattaacagattttaaaaggttgtgaagattacacataatgatatttaaatattagttgaatattttaagtttttatttttaattctatataattatttatag

SEQ ID NO: 31 - DNA, 4371 bp, Bombus terrestris
  wtrw-Bter
gaaaaataagaaaagataagcaaaattttcttttttaatctcctttctaagattagaaaagagaagtatattttacatgtaaaatgatctaagaatatatataacgtacctatagataaacctaaaattaacatttcaaattttccgtttcccgcaatgttacgtgtcttttccttttcttcaatcgcaacgagaaagatatgtgcaaggtattgcgaaaactagtaaaaataaataccagtcgatcaaattttatggtatattcattattaaaatttatgaatataggataaacataagatacaaagatgagaaagtccctataaatggaaacgaaaccaagcctcgcgaattgctgatatttctgatgtatgcgatttatcgtggtctccgcgatctcagaacagacaatgcgtccaagaagctcgattcgagttcagtatcaatcgagtcgtcagatagaacgacaggcttatgatgttgtaacaataacaccgtcacattgagtagtacggtcgttcgttcgatgaaattgatcgcattcgcacgtgaatacgatcgagaagtgaagaacggagagaagaacagtgatcgattttctttttgatattattaagctatcgatcgatgatgtaatcgcgtaaagcgctaaccgagaaggatggagatgaaccattcgcaggcctcgagctcgccaccggcgaaaaagaaagtacaaatagaaaggatcatcgatatggaggacgtaacggtatcgattccgaatagttcaaagcgtacgaccatgacttctctgctcttaacacgatggttggcgtcgaagagcccgcatcgtacagaagtagagacaaattggtcctccgacgatcaaagtttggaatacggaactccacctcctatcgaagagccacattgctattctatgtgtgccagcgagagctcttgtacagaggaaataaattgcaccttgcaggtaaacaaagatataatcaagaatctattagtggagcatatgagacacatcggtggtcgattgcaactccttgacgatctggaggagaataaaatggatctaaagaatcctgagcatttcgtaaaatactataaacaacaagaagtaaacgctttgctacttcacgccagttttcttggtcgaatagacgcgattgctggattgcacaagtgcggagcggatttaaaccactcggaacaaggacaaggactaactccgttacacttatccgcgtttagtaactctttagagagtgtacaatatttgctcactaacggtgccaacattcatctgggacggactcatacaccctttcattacgctgcttttggaaatgcttttaaagtagctcaatatttccttcagctaggcgtcagtcaggaatctccttgcggagaggagaccgtgttacacactgcggccagatcaaacgcttacaacgtattaaagctactggcatctaataatcataccttgaataatttagactgtaatgggtacgctgctatacaccacgtagcggacagaggagatccagctggcttgttagtactactagacgcaggttgcgagctagatgtgatgactaaaaaaggtgacactgctctacatctcgcagcggaatctagttgtgtggaaaatgtcgatctgttggtagaaaaaggtgcaaatgttcacttgaagaatcatagagatcagacagctttacatatagcttctcgatctcattccttggaatgcgtggaaatattgctaaagaaaggtggctgtgatcctaatatcgaagatagcgacggaagaacacctttacatctcgcattaggtagatcgttgctggcttatgacgtgacggaattgttaataatgtggaaagcaaatatcaataaaaccgataaatacggttatacaccgcttcatatcgctgctctgaacgaattgtctcagtgtgtggatatcctgatactgcatggagcggatcttagcgctagaacgaaaggtgggactagcgcattatccattatcttacgtaaaacgccgacttctttgaacgtctttaaacaaagattagatgcctcgataacgcttcaccagcatggttcagccactggagaggcggagcttcgtctcgactttcatcctctgctgatgcatcagcaacaaggcgaaataagatatctcgggacattcgtgaaagaaggatacaaagagattctagaacatccgctctgtcaggcgtttctccatttaaaatggcagaagatccgaaagtattacgtgggcaggctagtcttctatctattttacgttctcatactcacaggatgggtaatgactgctttagcgcataactgttacaacgagtcgcacggtcaattagacaacacccagccaccattatgtgcaaataccactggtatcaacgggtttctttataggcacccagctttactcgaaatggaatggtatgcattaatggtgctcacgattctcgaagcatttcgcaaattgaccagcattccaacgtatccctccgtccgccagttcttcacgcaggccgaaaacatggtcgaatggtgtgtgatcctgagcgtatttgccacttcttttatctatacgggcagaacgtatgcgtggcaaagccacgtaggtgcattcgccgtgctttgcggctggagcaaccttatgctaatgataggacaattgccaatattcggagcatacgtcgcgatgtttaccagtgttcaagcacaagtattcaagcttttgttagcgtatgcttgtctcttagtaggcttcaccgcaagcttctgcgtgatttttccacgttcgaaatcgtttagtagccctcacattggtctgatcaaagttttggtcatgatgactggagagttaaatttcgaggacctgttctttcctcgagaagaagatgggaaatcgatcgattcaggcggtacctcttggattctactccaagtttccgcacagttgtcattcgtgttgtttcttctgttcgttactatcgtgttgatgaatctactggtaggcatcgcagttcacgatataaaaggactacagaaaacggcgggacttgcaaaactcgttcgccagacgaagcttatttgcgatgtcgaaacggcactttttctcggactgataccaaaacgactaacgaaacttttacgatggacagctctgctgctaccttcacccttgagagcagttttaaccgttcgtcccctgaacccgagagagagtagattgcctcgtgatttgttatctgctgcgcacaaggtcgtaaaggataggaaaaatatgtctggaacattgtgcagcaggaagagcaacgctactgcatatacgtatttaaaaagcgagccatattcgacatttcgtcgacgttctccggaagaagacgtatccgtcgatgattactcggtcaaaggagatttggcagaattgaaaaagatctgtgataaaaaccaccaacttcttcaggatgtcgtgatggcattaatgaatgacaagcgcatcgttaacaaagaaaaggatgagaataattaagtttttactctgagaattcttagaatcttaatagcaaagatatatcgtgtgaataatctgaggaagcttaaatcacccaatcgaccttagaaatgcaggaattgtgcatacgtacgcttagaattttaagagtaatcctcaggccattttataatactatatttttcacaatcttgaagattcgcttatagaagatgacaattacgtgcttttaatattcgaatcaatgtgtatcgactatcgagtcctcgttaaaattttataaaacgcaacataatcttctggcaatgagaaagaatataaagtggaaaatccaaatgattaaaacgaacgtgtgtaatcaacattgaggatcgttgattaaacatatgttttgcatatttttaaagcaaaattcataaagagtcatatatggagtggaaacattgtaatttaaatactaaatttgttctcttcctttcttttctgaatttttataattctcatgattggtgattttaaatcctttacgtgtcaagagtgtcacgaatttgtgataaaagttgaaaaagaagctcgagatgaaatatttaaataataatataacgattatattctgatgtatgggtttgtacccaatatttgtaaaatattgtattacaacgcattaaagtccgtccatattatgaataaaactataaaaatacgtagaaatcagatagagaactaacagaataagctgaacacaacaaagtattttaatactatttaattttatacttgttaaaatatcttaattgtataaaaaattgtgtaaa

SEQ ID NO: 32 - DNA, 3278 bp, Nasonia vitripennis
  wtrw-Nvit
cggcgatcgccgatcggtcagtcgaagcgcgcgcgccgtcccgtccgatgttgctccccgtcagccggccatcaggatcatgccgcacgcacctttctcgcccccgaggttcatcatcctgctaggcaactgctccgacaactcgccgcgaatttacttttacctcaagtgatccgaaataaaagcctaagcgcacgtcgacagaatggcggagcccagcagcgaggagccgtctccgttagacaaggtctttccggctagtccgaactccgccgtccacaacaacaacaccaccacggtgaaccacaacaatacccgcaacagacgcgtccagctcgagcgcagctccagcagcattcagttcccggcctcggcgatggccctggcgcacaaatccaagacctcgtccaacctgctgacgggccgctgcctcagcagcagcaactgcagcagcaccacgcgccgtgtctccctgccctcgaccgaggatccgacctgggtgggcgaggaccgctgcatggagtacggcacgccgccgcccatcgaggagccccactgctactccatgtgcctcagcgagagctccttcagcgaggagagcagctgcgccgtccagatcaacagggactacctcaagggcctgctcgtcgagcacacccggactctcggctgcagactcttggtcgtggaggagctggaggccggcaagctcgacctggccagcgccgacaagtatctcgagggctgcaagaagccgcaggagctgaacgcgctgctgctctacgcgagcttcctcggcttcggcgagctgataccgatcgtccacaaccacggcgccgatctgaaccactccgagccggagctgggcatgaccgccctgcacctttgcgcctttagcaactgcctctccggcgtgcgctacctgctcggccacaacgtccacgtcggctccaagaaggcccacacgccgtaccacttcgccgcgttcggcaacgcgatagacgtggccaagttcttcgcgcagctcggctggagccaggagtcgccgctcggcgaagagacggtcctccacgcggcggcccgtaacaacgccctcgacgtgctccggctgctcgcgccgaagaaccccaccttgaatcggctggacagcgctggctacgcggcgatacactacgcggccgagcgcggcgactccggctgcctcaaagtgctgctcgccgcgggctgtctggtcaacgtgtcgacgaggaagggcgagacggcgctccatctcagcgcggaggccggatgcgccgagagcctcgagctcctgctcgccaagggcgccaatccggcagtcaggaacaggaggggccagacggccctgcacctggccgcgaggactcactcactggagtgcgtggaagcactgctccagcacagccgcagcgagcccaacgcggaggaccacgacggcaggacgccgctgcacgtcgccctcggcaggtcgctgctggcctacgacgtcaccgagatgctcatcagctggaaggcccaggtgaacaagcccgacaagtacgggtacacgcccctccacgtggccgccctcaacgagctctcccagtgcgtcgacatcctcatacagcacggagcggatctgagcgcgaagaccaagggtggaaccagcgcgctgtcgatcattctgagaaagaccccgtcgtcgctgaactgcttcaagcagaggctggacgcttcaatcagcatgcatcagcacggttccgccgccggcgaggtcgagctgaggttggactttcatccgctgcttcaacatcagcagcagggagaaatcggctacctgggaacgttcgtgaaggagggctacaaggagatactggagcatccgctgtgtcagtcgtttctgcacctcaagtggcaaaagatcagaaagtactacgtcggtaggcttctcttctaccttctctacgtcttagttctcacggcgtgggtgataactgctctggcgcacaactgctacaacgagtcccacggtcagctcgacaattcgagccgtcccctctgcgccaattccacaggcctcaacggcttcctgtacaggcatcccgtcgtcctggaagtcgaatggtacgccctcgtggtcctgactgtactcgagggtttgcgcaagctcatgggcatcctgacctactccaccgtccgacagttcttcactcaagccgagaacatggtcgagtggtgcgtgatcgttagcgtgttcgcaacgtcgttcgtctacaccggcaggacctacacttggcagagccacgtgggcgcctttgccgtgctctgcggctggagcaacctcatgctgatgatcgggcagctgcccatgttcggagcttacgtcgctatgttcaccagtgtccaggcgcaggtttttaaactcctgctggcttatgcttgcctactggtaggtttcacggcgagcttctgcgtgatattccctcggtccaagtcgttcagcagtccgcacacgggtctaatcaaggtgctggtcatgatgaccggagagttggacttcgaggaattgttcttcccaggcgaggaagaaggcggccggcccgtcgacgtcggtggcacctcctggatcctcctccaagtttccgctcaactgtccttcgtcctcttccttctcttcgtcaccattgtcctcatgaacctactggttggtatcgccgtgcacgacatcaagggcctgcaaaaaacggcaggtttggcgaagctggtaagacagacgaagctgatctgcgacctggagacggcattgttcctcggcctactaccgcaatgcttgatgaaggtgctgaggtggacagcgctggtgctgccctcaccgctgaaggccgtgctgaccgtgagaccgctgaacccgcgcgagaagcgactgccccgggacgtccttgccggtgcttacaaagtcgctcgcgagcgcaagggcaacctactgaattccacgctgtcgagcaagcggagcaacaatagcacgatctacggataccagaaattcgatctgaatgcttcggtgaggagaaggacgaacatgaacgaagaaccggcgacgacgctggaggaggcggcgaggctcaaggaggaggtggcagagctcaggaagatctgcgaaagcaataacctgctcatacaggagctggtcaagagctttacttttggcaagtgaccgtgggagaggttgttagcctggcgttgggaagggtcgccgacgcggtgaaagttattgcgagaga

SEQ ID NO: 33 - DNA, 2988 bp, Cimex lectularius
  wtrw-Clec
tcttattttatcgtttttatagattttttgtgtttttaattgtgggaactttaaaatgatttctgaaataatcagtcatggtctattttaattgtgggattggtgggagaaatgtacagttatgtccaaccaaggagaggggagtggatgttctgcttgtttcttggaatcatttggattcagaaggaaactgtacagtggtgagtcactatggagaaagtgagtttagatagggctacaagtgtcaatttagaaggtagaaggaaaaagcccagctttatcaacaggtggaagagcttcaggtcgaaaactctaccggcaaaggaaattgaattcaaagatgccgctgaagaagtgttcagtgagaacatggaggatgaattgagcgtgaggatatgcaaagatacagtcaggcagatgttactcgactctatgcggtcgtcatccggtgatatcagaataatgttagaaattgaaaatggaaatgagccagatttaagcaagctgacgcaaaaggagttaaatatcttcttactttggatttgttttataaaaagggatgacatcctgctaaaactttgtcatatctatccaaatattaatttgaattttgtcactgatagttttggacctttacatttgagttctttcagtgggggtgtcaaatgtatggaattattgatatccagaggtgttgatacaaatgttcaagccaataaccaaacagctctccattttgcaacaataggaggttcaacagaagctgtgaaacttttactttcgaaaaattgtaaaatttttgatactgtcttgcactctgctgtacgtgctaattcattagagtgccttcgaatacttttacgcaaaggtattaacccaaacacgtgtgatatgtatggtctcactcctctacacattgcatcagaccggggaaatctacatataatgaaactgctcttagattcaccaaatgtagacgtcaatgctggcacgttagagaaaggcaacacagcattacacttcgctgcagaagggggcaatcgagagtgtgttctattgctgcttagcaaaggagctgatttaaagagaaaaaacagaaaaggtcaagtgccgctgcatgctgcaacacgttcacagagcacagaatgtgtagaggctcttttaaaatccggatctaatatttgtgagaacgacaatgaaaacaggacacctttgcacaccgctgttggaaaggctctacacgcttataatattgtagaagtattgataaaatggggtgcagatgttaatttacgagataaatacggctatacgcctctgcacattgctgcagttaatgaattaagacattgtgttgatcttttaattatgaatggagctgatgtaagcgcaaggacaaaaggcgggctcacagctctaagtattgtacggagaaaaacaccagcatcacttgttgccatcagtagacgattagacacatcaatttctctacacgatcctgaacagtcatttcgggaggtcgaattgaaattggacttcagagcacttcttcagcattcttcaggaggtgaagtaggacttttaaaaactttaattgatgaaggtcaaaaaaatatgttagatcatcctttgtgttgtgcctttttacacttgaagtggcaaaaaatcagacggttttatttttctcgcttattattaactagtgtttttgtattgtttttgactctttatgttataacgacattggcgcataactgttacaattcagcaaaatataacttgacatctgaacgagagctttgtgttcagaactcagcggtgggcaatatgttgttaaataacccagtattgatggaaattatctggtatatattggtattttttacattttgtgaaatagcgaggaaagtttttggactggctggatacacctcagctgggcaatattttgagcagtgggcaaatattattgagtggtttaatatttgcagtgtatttattatttcttttgtatacgagggaagaacctacgtatggcagaaccacgttggagcatttgccgtattatgcggttggaccaatctcatggttatcataggacaacttccagtctttggcacttatgttgaaatgtttactaaagtccaaaaagagtttgcaaaactttttctcgcatatgcctgtctgttaatcggttttacaataagcttttgtgttatctttccaacatcagatgctttcaaaaatccacttataggatttgttaaagtgttagtcatgatgacaggtgaattagatgtagatttactattgggttcggaagacaaagactcaattcttctgagtataagtgctcatataacatttgtactgtttctgttatttgtaaccgtcgttctgatgaatttgctaataggcattgctgtacacgatatccaaggactgtccaaaactgccggtctatcaaaactagtaaggcaaacagaattgatttctttcctcgaactgtcattattccaagggtaccttccgaaacagatcaaaaacatattaaaatggtctgcactcatgtctcctgcagcatatcgtgtggttttgcacgtcaaacctcttaatcctcgagaaaaacgacttccaaaaagcataatggtagaagcccatgaaatagcaagaaaggcgaagaattgctatgcacaaaattgcgttgaagaaaagcacaatgacatggcgatgttaaatcaaaggatggacaaaattgaggaacttttaaaaaaacagcattctattcttgagatgattttaaagatggaaaaaaggatgaacaatgaaatgtcaaacatactgaaagattgacttcaattacattctgaacagatttttttcagccttgttaaacattttatttcctcttgagctatctgggctaagaacgtccgtagatataaaagcctctgtacaaagtggaggagagtctggacaagcgggtgc

SEQ ID NO: 34 - DNA, 2958 bp, Halyomorpha halys
  wtrw-Hhal
tataatgaattagtaatccagtaatttatttagagttactttcttactttgatcatatttgatatacttaatcactagttcatatttgaattgatactttctctattatctaatatccattcataattgtggagttcttgcaactttaggaggaaactgaagagatcactggagggggaagatatacagttaaacagccttgaagtgggggcagtggttttcagtgttgggtgagtgagtcatgatggaaacagcaaatttagtcagagcgactagtgtcaacctagatgaaaggaggaagaagaaaagcagttttatcaataagtggaagagcttcagatctcgaacacttcctatgaaggacatagaacttggtgaaacttcagttgatgatgttatatctgaaaatatggaagtggatttaagtgtaaaaatatgtaaggagaaaataaggcagggttttatggattgtataagagcatcatctagagatccaaaaattttgatggatgtggaattcagatatagtgttagttcagaagaattagcgaaggtaaatccaaatttgatgttattatgggcctgttttacaagaagagatgacttattacccgagttggtaaaaatgggagccaacatcaatttcagttgtccttttgaaggatatactcctttgcacctagccgctttcagtggatgtttgaaaagtatgaagtggctaattaatgaaggctgtcatctggaaatcatggcaaataattattcgccattacactttgcagttttaggaaataatttggaggctgttaaaattctattaggagcaggttgtaaagtccataatactgtattacattgttctgtccgtacaaatgctgttgaatgtcttccaacattgttatcaaaacaagtagatgctaatacattagattcggcaggtgtttctccacttcatatagctgcagataccggtaacataaatattgttaggatgttgttagaagtagaaaatatcaatgtcgacttattgtccagggaccgaggaaatacagctcttcattatgctgctgaaggaggtcatattgatgttatcaaagtgcttttgattaaaaaagctagcgtttctataagaaacaaaaaagggcagattccattacatttaggaactcgttcacagagtgctgactgtgttgaaatactactaaaagctcattcagatataggtgcgaaagataacgaaaataggactcctttgcacactgcagtaggtaaaggtctcctagcttatagtaccgtagaaatgttaataaaaggtggtgctgatgtaaatgtaaaagacagatatggttatactgctcttcataatgcagctgtaaatgaattatcgaattgtgttgatcttctcataatgaatggtgctgatgtaagtgctagaacgaaaggtggattaactgctcttagtattattaggagaaaaaccagtgcatccctaggaactattaagaaaaaacttgattcatctctatctattcattatccagaacaaacttatagagagattgaattgaaattagattttcgatatcttctgcaacattcatctggaggcgaagttggacttttaaagacactagtcgatgaaggtgaaaaaggaatgttggatcatcctttatgttgtgcgtttttgcatttgaagtgggaaaaaattagaagattttatttcttacgtttatttcttagtgctgtttttgttatgctattgactttgtatgttatgactgcattagcacataaatgctacaatactgcttataatgtaaccattaccactaatcaaacaggtgacatctgcaggaaaaattctatttttggaaaggtgcttttagaaaatccttttattatggaacatttgtggtatgcattgtcagtctttactgtttttgaaatatttaggaagctttttggaatagcaggttattcatctgcagggcagtactttgggcagttggtaaacgttattgaatggtttacaatcattagtgtctttgccatatcatttatttatactgggagaacctatgaatggcaaaatcatctcggtgcttttggagttctttgtggatggaccaaccttatggttattattggtcagcttcctgtctttggaacatatgtagaaatgtttacaaaagttcaaagagaatttttcaaactattctttgcctatgcttgtttgttgattggttttacaatcagcttctgtgttatatttcctactaataaagcctttgaaatgcctttaattggatttattaaagtacttgtaatgatgactggggaattagacatggatcttcttctttctgatgaagacaataaaaatcttttattaaattttagtgctcatataacatttatactttttttaatatttgttactgttgtgttaatgaaccttcttgttggaattgctgttcatgatattcagggattacataaaacagcaggcttgtcaaagcttgttcgtcagactgacttaatttcatttttagagctgtctctatttcaaggttatctcccaaatcaaattgtagaagtactgaaatcatctgctttgatgtcacctgatgcttatagggtagtgctacatgtgaaacctcttaatccacgtgagaatagactacctcgtaatatcctgatggcagctcatgaaatagctagacaaaaacgaccgtgtacctctcacagatctccaaatgatgaaagaccttataatgagcaactgcttcaaaaaatcgataaacttgaagctatgttagaaaatcagaaattaattatggatgaattgttaaataaactgaaattgtaaatttgactactgagaaatgcttgtagatctcataaatttaatctagtcacttttgatctttttgtattaataatgtgtgtcactgcttt

SEQ ID NO: 35 - DNA, 3021 bp, Nezara viridula
  wtrw-Nvir
  misc_feature (967)..(993): n means a or g or c or t/u
  misc_feature (2104)..(2105): n means a or g or c or t/u
  misc_feature (2109)..(2109): n means a or g or c or t/u
  misc_feature (2112)..(2113): n means a or g or c or t/u
  misc_feature (2115)..(2115): n means a or g or c or t/u
atgatggaaacagcaagtttagtcagagcgactagtgtcaacctagatgagaggaggaagaagaaaaacagttttatcaataagtggaagagctttagatctcgaacacttcccattaaggatatagaacttggtgaaacttcagttgacgatgttatatctgaaaatatggaagtggatttaagtgtaaaaatatgtaaggagaaaataaggcaaagcttcatggattgtgttaggggaatgtccagagatccaaaaattttgatggatgtagaattaagatgcagtatcaattcagaagaattatcaaaggtagatccaaatttgatgttattgtgggcttgttttacaagaagagatgatttattacctgagttgataaaaatgggagccaacgtcaattttacttgtccatttgaaggatatacacctttacacctagctgcattcagtggatgtctaaaaagtctaaagtggttaattaatgaaggctgtaatctggaagtcatggcagatagttgttcacctctacactttgcagttttagggaataatttagaggctgttaaaattctattaggggcaggttgtaaaattcataatactgtattacattgtgctgttcgcacgaatgctgttgaatgtcttccaatattgctatcaaaacaagtagatgttaatacattagactcaacaggtttttctccacttcatattgctgcagatactggtaacataagtactgtcaaactgttgttagaagtagaaaatatcaatgttgacttattaacgagagaccgaggaaatactgctcttcattatgctgctgaaggcggccatattaatgttatcaaattgcttttgagtaaaaaagctgatgtatcaataagaaacaaaaagggtcagattcccttgcatttaggaactcgttcacagagtgctgaatgtgttgatttactgttaaaannnnnnnnnnnnnnnnnnnnnnnnnnngataatgaaaataggactcctttacacactgcagtgggtaaaggtcttctagcatatagtacggtagaaatgttaataaaaggtggtgctgatgtgaatgtaaaagatagctttggctacactgcccttcatatagcagctgtaaatgaattaacaaattgtgtggatcttctcataatgaatggtgcagacgtaagtgctagaacaagaggtggattaactgctctcagtattattaggagaaaaaccagtgcatctctatcaaccattaagaaaaaacttgattcatcggtaactattcattatccagaacagtcttatagggagaatgaagtgaagttagattttcgatatctcctacaacattcatctggaggtgaagtcggccttttgaaaacacttgtggatgaaggagaaaaaggaatgttagatcatcctttatgttgtgcatttttgcatttgaagtggcaaaaaattagaaggttttatttgttacgtttatttcttagtgctatttttgttatgctattgagtttgtatgttatgactgcattagcacataattgctacaatactgctaataatacaactctttactatacattaaaagagacattaaagaatggtacattaaactgtacaaaacaatgcaatcagacaactaatatctgtatgaaaaattctatttttaggaacctgcttttagaaaacccatttattatggaactcttgtggtatatattattagtgtttacgatttttgaagtgttcagaaaactttttggaatagcaggctattcttctgcaggacagtattttggacagttgataaacattattgagtggtttacaatcattagtgtttttgctacatcatttatttatactggaacaacctatgaatggcaaaatcatcttggtgcttttggagttctctgtggatggactaatctcatggttattattggtcagctacctgtctttggaacatatgtagaaatgtttacaaaagttcaagcagaatttttcaaactattctttgcatatgcttgtttgttgattggttttacaatcagtttctgtgttatatttcctactaacaaagcttttnncaanccnntnatcggatttattaaagtactagtaatgatgacaggtgaattagatatggatcttctttccgatgaggacaataatcctcttttattaaatattagtgctcatataacttttattctttttttaattttcgttactgttgtattgatgaatcttcttgttggaattgctgtacatgacattcaagggttgcataaaacagccggattgtcaaagctcgttcgtcaaactgacttaatttcattcttagagctgtctttatttcaaggttatcttccaaaccaaattgtggaaatgctgaaatcatctttgatgtcacctaatgcaaatagagttgtattacatgtgaaacctcttaatccacgtgagaaccgactacctcgtaatatcctgatggcagctcttgaaatagcaaggcaaaagcgtccgtgtacctcttacagatctcctggtgatgaaagaccttataatgaacaactgctccaaaaaattgataaacttgaaactatgttagaaaatcaaaaattaattatggatgaattgttgtataaactaaaactgtaaacttggcatctgagaaatgcgagtagatctcaatttttatctagtcattttttatgttttcggcttaataatgtgtgtcattgcttttggcagatactctttccactggatttaacagggttacgagacggtgtagatattgaagcgactgtgaaaggtggtggagaaattggtcaagctggagccatacgttggggaatatcatgggggcttcggtgcttcgtctccccagatatgtttgaaactatgaggcttgccggactcttgcagagagattaccgacgtccagaaaggaaaaagcctggtcaagctggtgcgagaaggaaattcacttggaaaaaacga

SEQ ID NO: 36 - DNA, 7869 bp, Nilaparvata lugens
  wtrw-Nlug
tttcgccagtcgcgagctggcagtggtgtcgtaaacaagtgcttagtatgtgtttgtgtgggaggcgtgcgttgctgtgacacacgtgttgcgatgtcggtgtcgggtgcgacactgcggtccacacaccggccgcaactggaccgtgcagtcagcatgaacatcgacgaccgctcctacaagtcaaaatcggccaacccgagtctgatcggtcgctggaggagtttccgcatcaagcagcctcacaacggaatggcgaccagcatcctgaacggacgtctcaacctcggagactccccgcccgctgaagatgatgtcggattttttgagagcctcgacgacaacagcatccccgacgaactcagcgtcaaaatctgcaaggattccattcgtcaaagcattctcgatcagatgaagatctcctcaggtgatgtcaaacttcttcttgacattgaaagtggaaaagctacgcctgaaaccttagaatcaagcattgctcattgttcatcccttgagagaaactttgcatttttgtggtgcacattcatgaagaaacacgaaatgcttgaaattcttaaccgttatggaatagatctgaactatacactaatcactgaaggattaagtgccattcacttgagttcgtttagtggatgtttgaaatgtgtgcgttggttgataactagagggtgtaacgtaaatcacatgcctgatgcacacacaccacttcactgtgctgtatggggcaactcaccagaaaccgtacgtcttctcatatcgaatggtgcaataatacgtgaaactgtgatgcattacgctgtgcgcgccaacgctcacgagtgtttacaaatgttactggatgagggagcagaggtgaactggttggatgtgggtgggagtgccccgttgcacattgcagccgatcgccgtatgtcgttgtgcatgaaaatgcttctcaattacggcaaactagatgtcaacatcgcctccagagagaaagcaatgaccgctctacactatgcagctgaaggcggctacttggactgcattcaaatgttactctccaagaatgccgactacaacaagaaaaacaagaaaggtcaaacacccctgcatctagctgctcggtctcagagtgttgagtgtattgaagccctactgaaggccgggtccaacattaatgaaaaagactttgaaaatcgtacacctctccattcagctgttggaaaagcgcttctagctttcaattcagtcgaatctcttctaaggtggggtgctgatgtgaatgtgaaagacaagtacgggtatactgctctacatatagcagccctcaacgaacttgtccagtgtgttgatatcctgataatgtacggggcagatgtgagctctcgcaccaaaggtggtgtgaccgcattgagtatcgtagcgcgaaaaacaccggcttgtttagagacaatttgtaaaaaattggactcgtccatctcattacatgatcctgaggcgtctaatagagaagtggaattgaagttagatttccgatacctactgcagcattcttcaggtggtgaagtaggtttattaaaaactctaatagatgaaggacagaaaagtatgttagaacatcctctatgcggagcgtttctgtatatcaaatggttgaaaatcagacgtttttatttttgccgactatttctcacagcgatatttgtgattctcttaacaacttacattctgacagcactagctcattactgttataattcagcagccaaccgaacaatcaccgatctagaactatgtcgaaataattccgttttcggatttgtgctaactgagaaccccgaatcaatggaagtgatatggtacatattagtgatttttagcatttgtgaaataactagaaaactgatgtcaatagctggttactcaactttgaaatactattttttccatttaggtaatgtttttgaatggttcactttgatcagtgtgtttgtgatatctttcgagttcaccggtgaaacctacacttggcaaaaccatatcagtgcatttgcgatattgtttggatgggcgaatttgatgttaatggttggtcaactaccagtatttggaacttatgtagcaatgttcaccaaagtgcaacaagaatttcttaaattacttatagcttacctctgtctattaatcggtttcacaataagtttttgtgtagtatttcccacctcagaagtattcagaaacccattggtcggaatgataaaggttctagttatgatgactggtgaattagatatagatatgctaatgcagaaaggtagcaatcagaaagcttccccattgtcggtgagtgcacatataatttatgctttatttgtattacttgtagctgtagttctcatgaatttagttgtaggtattgctgtacacgatatacagggcctacacaaaacagctggactatcaaagttagtgagacaaacagaactgatatcatttttagaactagctctttttcaaggttatctccctaaaaaagtagtcaacatgctgaaatggtctgcgttgattgctccagctgtatacagagtggtgctgcatgtaaaacccttgaatcctagagaaaagcgccttccacgccatatattagcggctgctcataatatcgccagagattgcactaaaaattgtcacggcggctcaatgtccgcagcaaccatgcaccgatatgctttatctaagaataataaatctctaactgaggaattgaaagcactcagggaacaagtccaagagcaacaattattgttgaatgatattctcaacttattgaagtcgaaaaatttatgatattggaaaattttaccaaactaataatttcaggtttacaataattggaatgaggactatcagaagtgtttgttgacagagcagagttttattagtgttaggattaattttacgcaaggaataataattttaaattatgactttccaaaaaatactctgaatacttcgatttaatccttcaagaagaaagaagcttctttttaaaacttgaaagacatttatgaagattttattcaacttaggtcagtaatcatgaataattgaaacaagagattttcagatctcgttacatattcatattttcattcttgtatatttcccagttcatttaacaaaacgcacaacgcaagtacctagtctgtttggaatttattattatctcaaacataaataatcctttcattagatcagtacggtacatgaaatgatttatttattgtagtgatgaaaaatcaataaaatctatatatttctcacaatgaatggccgccattctcatatatctcaacatggtcatcgacaataaatttcaatagtttttttctgatatttttgaagaggtatttctagtagcctgtagtaaaaatatccgccaaaaaaagcataaatccagagcttctcagacgcttccaggtaacaactttaaaacagaaatttatttgcgatcataaattccattcagattcttttcgtgctgatgaatttctcccccgaattcactcagctatttgtcaaataatttatcgctttttgtgatagcttcggcatggcattcgttcaagattaagaataactcagtctcatttcttgttttccacttttacttctttcacactttctatctggaatgtcactgatgtcaccagaaccatatcaaaatgataaattgaaagtaatcctcatcaggaacctgttaagtaatttacatctcctcttataaactttcaatcattcaaattcgagtggagaagtttttagcggtatatttacttagacatccatgaatcttgttagttttttgtttgaatgacaggcaaccgttactcttttcactctataatttttgttacaaatagcgcagagctttggaacaaattagcttttgtaagtaaatgctgttcgacattacattgtgttgaacgtacgatgtttttttttgtaattgcactgtatttacatttacatttcattggacgttgacccttcctattttccatctttgttggttgttgaatgctgatggtgaattttcaaaatgagaacaatgttctaacaaaatgtttcacctgatagatagtcttgcagtcttccagtttttacatattggatttagtccagctagtcctacatttcgtagaaccaacaaaatataccttttctattaatttatttgccaatattacgtctgctcatgctatcaatgacagaataaataattctaaaaacttgcaaagttgataataccttgattatacatgtattttaccagcactccaaatatttttgaatattctgtgtttgtcatgaaataatcttgataattgagaacggtcttgaccaagtgaggtttattgcctagcaatcagctactatgattcagctagtcaaccaatgattgcttcctaaaaacatccatgatagtattttacaaacacaaatcttcaataaattcctaaaaaaataaaaatttaaagaaatatttcatcttgcaagccgctggcattttattaattaacttacaattcttccccaagttcccaatataagggaactcaaccaacaatagggaactgatttacataacactgaataactggcattgacaactcatgcatccattaggtttatgaaatattcaactcaactaataaacatagcctactgcctgtagaaagatttcaattgtcctattacattttcaacatattcatagagaataatcattatgtaaactagactctgctctgttcaatgtcagataataatggtgcatttattttttacacaaaatgctagaatatatttgtctgtcagaaccatatagcaatgtgaagcaataaaaaagggaacaaataagatagtgcgaccctctttttatctagtcaatcgatttaaataattttaagaaaatttcaattctatcgtagttataggctactgtgttttttaagctacttgtaatcggtgaagaagtaagaatattctcaaacgaatttttttctcatgacacaaatatttttcaacaaatagtgattgctttgatgtctatcgtcaataataattattgtaatatcaagctaaaaacgaatgccgcaatatttttgtataaaatgatgttttataaatggagaatttgttattaaatattttatttattattcgaatgttttgatatcatagcaaccttggagcttattgatactcaacaatggattaatgctgacaatcattttcatatatacatatcctagtaggttttgatctagagagcaaataaggtcgaggtaatctgaagtaatggtttgagaaatgctagatcatctttgaacagaatcttggttctgtttttccgaacaatttgtgaatcctggttagtcaaaactgataacatttatcaagattatagcggtacacaggttattgttcaacctggctcagattacattaaaatctactggatcgtcattatgatcaacttttgaagttctacagaaatttatcaacattcattctcctcttgacattttttaaaattctatcgataattacattgaataagctctaaagttttataattattcacttcttcactgacattaaaattaaccaacttcatgaaaaactgtctccaggttcaaggttcaaattaatcgttgggcaattgaattaattaatatttagtatttaatgtacaataataacataactatccaaatattcttctaaagtagatgcaagaaagaagatgatgagaaatacattagtgtgttctaaaattgtcagtatgccagagctcattgcgttgattaattctcttttatgatttgatataatttccaatttaatctgcaatattcccatccttgtttgattctgaatcagtttcattagcaagtgtgatcctgaatagattaaaatatgaatcaattcaaatcactaaaatgtaggacccctctgataataatactatttctattgattgtctcaattattatcgaagatcatttgaattaatcactgataaaattttgtgataattctgtaatgagacaacataagcgatttagcttatgagctaatattggttcaatatggaatttgaaaaaggaacatactagaaaactctcagttatgtgatggacaaacatttaattattatttctgtttggaacaataattcacttgaattggcatgtattgtaaacatctaaatttatctaacaatcaacaacatagaacattatttcatctaactagacctaaaaaataaggtataatgatcaatatcagtgtgaataagttgatattaatttatatcaattcattgacaggtaccaaaaatcatcgctgtatgttcttgtaaaaataaaattatcactatccatgaataacaaacaatatctatcaacaacatttccacaattaataggataacgataacaataaaatttgcaaataaaacattcataataaattatgtatcgtgtaatgaataattataaataaatagcatttttagataaaattatgccgaatcaactatagactattcaatagaaataatgagtataaccaataacaacagaaaactcaatcgaactgatctaaatgatgaatagtatagtgctgtgataaataggcctacaataatttattttaaactatcagtacgataaataatatggactagtgcctgactaggctagagtatccaatgcacaattaataacaacaaattggctatcaatctaaaaatatattcacaaaattcgtatgttattaaatattataatcaattcagctataagacttattactacgacaattttatcagtctaaatggttggtaaccaatactaataaataatactgactagtatgataaataatataacaaatgtgaatacattttattttatactgatgatgaatacacttaaaaattgtacaaaattgtattgaactgcagcctatagtataacttgtcaaaattgtaagtatcaatttttatacttcaagagaataatattttaataatgcatgataatgaaataattatacaaaattaaaatgtagtgactaattcaactttttagctactatgaagaatatgaatccaattgacttttgaaattaataatagtgaccaatgcgattaaaaattaaaatcagactttatgaattgaaataaactagtaataattagcttgtatgtaatacttgcaatatacaattacatagatgatagactaataactagatcttttatctgtgaataaaattgaattatttgatttgtgactgtaaacatcaatctgaagggattttgaaataaataacagtgactagtctaaccactgaaaagagacattacactaaataaaatgaaataaaaaagtatgtaaaagtattcaaaaatgatttttgaaatgaacaagcgtgaacaattaataactagtgataacaaatatcagtctactgattcaggacaatattaaagccgtttttagagttaagctcttcctgcgtacgacactaaaacccaaacatatttgtatcaactaacaattacaataaaataagagctattaacaatccaaattacttttttgaaactaagggccggtttccgagcttggcatttatctaagttcttacttaaaacagctgcagtcagaaaattggctttccaaaacggggcgttgtcgcagtgttcatgacagtaatctcatttctataattggaatcgtttttccttgacgaaaatcgtttttcctaaataattgaaaatagctgaaa

SEQ ID NO: 37 - DNA, 3235 bp, Acyrthosiphon pisum
  wtrw-Apis
cgtgtctggccgtcgggagggggtagggggtatatagagggagatacgatcgcgtacctatatagttccgatagcagccacgctgttggcatccgtagcaccacgagaggccaccgaccgcatataatattatcatacagccgccgcaccggacattggcgagcgaatcgtcgaaggaaccgaacgacgcgcgcgggaacccagtgcgcttcagcacggcgagatactacacgcacgaaacgaccgtcagccagtcttccgacatccggtttccaatattgtttattgttccgcaccattcgacgtgcaccgtcaccatgaccggcaaacatcacctggaagtggccgtgccgctggacaggaccatcagcctaaacgtgcacaaccggcaaggtggcgcggccgcagcgtcccggtcaccgtcgtcgctcaaggaccggtggtacagcttccggcaccggccgggcggcggcggtggcgatcagcggcggcggtccaacgtcgaggagttcctgttcatggagagcctaccagacacgccagccgctgacgagccgccgtccgcggccggacaggagatcgaactgtccataaccatacggaaggacaccattaggcgggatctgatggactcaatgcgcacgtgcaacgggcggctacagctcatggaactcgtagagctcgacgagttcgacccgggcggcgtgcacccaccacccaaccagagcgagctggacaggctgctctgctgggctgtttacatcggcgcgccgacagaatgcctggacacgctgcacgagtgcggcgccaacttgcactattcgcactgcggcaacatcacggccgttcatttggccgccttcatgggcaacgccgacgcgctcaggtggctaataaaaaaaaaatgtgacatggacacaattcaaagtggatatacaccattacattcagctgttatgggcaacgctttagaaactacaaaaattctgatagaccagagatgtaaagtaactgacacagtattacattgtgcagtacaagccaatgctgtagaatgtgtcaagtacttactaaacattggtatagaccccaacactttggataccagcgggaatacacctcttcatttagcagcagataaaggatatacagaatgtctaaaacttcttttagccagaagtaataaaacaataaatttaaattctaaatccaggcaatcgacggccttgcatatggcggctgaaaatggatatacagaatgtgttcaaatacttttacacacagggtctagtcatagtgcggtaaattacaagaatcaaacagctttacatctagctgccaaagctcaatgtgccgaatctgttgttatattattagaattaggagccgaagtaaatgctttagatatcgacaaaaggacagcattacattctgctgtttgtaaagcttatttatcattccacgtggttgaagtattggtaaaatggggggcaaatgtcaatattaaagatagatatgggtacgctcctcttcacatagctgctttaaatgagttatcccaatgtgtcgattttttaatcataaaaggagctgacataagttctagaacagtaggcgggatgagtgctttaagcataataaacagaaaaacacccacaagtataaatacaattaaaaaaaaatttgaccaggcaattacattaaatgaccaagcttccgccaaagaagttgaactaataatggattttcgatacttattacaaaatcctagtcaaggggaaatcattttattacatacattggaagaatgtggtcaaaaggctatgcttgaacatccattatgtaaagcatttttgtacttaaaatggcaaaaaattcgtagattttattttgtacgtctggtttttgatgcaatttttgttttactcttaaccacttatgtaatgacagctttagcacatgattgttataataagtcaagaaacctaacagacaaaaaaaaaataactcatagtcaagaacttaacgaattggagaatcaaaatgcctgtcgtttaaatgtgaatgtatttgattcacaattaatatcacacataattatagaatttgtttggtatatattgttgatatttacaatcatcataataatcagaaaattaattggtacaacaggatttacttcagtcaaacaatatttcttaaacattactaacattgttgaatggtttgtggttgcaagtgtttttttaacatcctttttatatggaaataaaacgtatgactggcaaaaccctattggagcatttgccgttttgtttggatggtcaaatttaatggtgatgattggccagttacctatatttggaacatatattgcaatgtttaccaaagttcaaaaagaatttgctaaattgttgctagcttactcatgtttgcttataggatttacaataagtttttgcacactattccctacatcagatgatttcaataatcccttaataggtatagcaaaagttctagtaatgatgacaggagaacttgacatagatttgctattgaaatccgaagaatctccaattatttttaacgtaagtgcttatataacttttatactgtttattgtatttgttactgttgtattaatgaacttgctagtcggaatagcagttcacgatatccaaggtttgcacaaaactgcagacctctcaaaacttgtcagacaaactcaactaattcactctcaagaacaagcattatttcaaggttgtttacctaggcgtgttataaatttttttaattggagcgctagagttacaccatcagcgtatcgagtggtactttatgtaaaaccattaaatcctacagaaaaaagattaccaaaatacataatggaagatgcattgaatatagcaaggcaacaacgattaaatacagttgactataaacaagctatgttagaaaataaaatggaaaacaaggctttagttgaagaaattaaacaactaaaagaaattgtacaaaatcaacaagatctcttattaaagcttattaataaatcttcataaatattcctagtcttaatttgtatttgttatgtaatttaaatattatatgaactatgttatatttaaaaattattgatgtgttgataaaaatatttgaaaatattacttcattataatattgaattatgatcttgttatgtttgtcatgataaattacctaataataa

SEQ ID NO: 38 - DNA, 4670 bp, Myzus persicae
  wtrw-Mper
attgtagacattgcccaagcaaatggaaatgcattatgacattgaactatagtaagattttaagcagacgaacagtttgtgttctgtaaatgtttaaatgagcaacttcaaagtgaccaagaaattaaaaaaaataacaaaacaaagtcgatagataaccatttatcggaaaattatagacaaatattaataaattagaaccaatgacaaataaataacagtattagcaaacatacccaaaccaaaatacttgtgttatttcactttttgtgaaattaaggataaaaaaatgtatacacctaatgtcctaatacatatcttcgtatatacaacacaaactttattaatacataggtacttaaaggctacagcgtatatgtacattcgatacacaatgtattatattatgtaaaatagaaacaataataatgcgacttgcctatctgaaagcgtactaaattatattttatcgtactgcagaagtagctgcagcggagacgcagtcacggtgcaggattcgcacgtcaccggtcactgccgcgtgcgcgttacaatattataatattaattcggtattataataacgataatattaataataaaaacaaggatgaataataataataaaaaaacattatattaaacgaaacggagcggagcggctggcgcgcgcgcgtgtctggccatcgggagggggtagggggtatatagagggagatacgatcgcgtacctatatagttccgatagcggccacgctgttggcgtccgtagcaccgcgagaggccaccgaccgcgtagtataatattatcataccaccgccgcaccggacattggcgagcgaatcgtcgaaggagccgaacgacgagcgcgggaacccggcgcagcactgcatcgcggcggccagcgagatactctacacacacgaaacgaccgtcaggccagtctttcgacatccggttttcgatattgtttattgttccgcaccattcgacgtgcaccgtcaccatgaccggcaaacatcacctggaagtggccgtgccgctggacaggaccatcagcctaaacgtgcacaaccggcagcaaggcggtgcggcagcggcgtcccggtcaccgtcgtcgctcaaggaccggtggtacagcttccggcaccggccgggcggcggcggcgaccagcggcgacggtccaacgtcgaggagttcctgtttatggagagccttccggacgcgccggccgccgacgaaccaccgtccgcggccggacaggagatcgaactgtccataaccattaggaaagataccattaggcgcgacctgatggactcgatgcgcacgtgtaacgggcggttgcagctcatggagctcgtcgagctcgacgagtttgacccgggtggcgtgcacccaccacccaaccaaagcgagctggacaggcttctctgctgggccgtttacatcggggctccggccgaatgcctggacacgctgcacgagtgcggagccaacttacactattcgcattgcggcaacatcacagccgtacatttggccgccttcatgggcaacgccgaagcgctcaggtggctaataaaaaaaaaatgtgacatggacacaattcaaagtggatatacacctttacattcagctgttatgggcaacgctttagaaactacaaaaattctgatagaccagagatgtaaaataactgacacagtattacattgtgcagtacaagccaattctgtagaatgtgtcaagtatttattaaatattggtatagatcccaactctttggataccaatgggaatacacccctacatttagcagcagacaaaggatatactgaatgtctaaaacttcttttagcgagaagtaataaaacaataaatttaaaatctaaatctagacaatcaacagccttgcatatggcggctgaaaatggatatacagaatgcgttcaaatactactacaaaccgggtctagtcatagtgcggtgaattataaaaatcaaactgctttacatctagctgccaaagctcaatgtgctgaatctgtggttatattattagaattaggagctgaagtgaatgctttagatatcgacaaaaggactgctttgcattccgctgtttgtaaagcttatttatcattccacgtggttgaagtattggtaaaatggggtgcaaacgtcaatattaaagatagatatgggtacgctcctcttcacatagctgcattaaatgaattatcccaatgtgtcgattttttaatcataaaaggagctgacataagttctagaacggtaggcgggatgagtgctttaagcataataaacagaaaaacacccacaagtataaatacaatcaaaaaaaaatttgatcaagcaattacattaaatgaccaagcttcagcaaaagaagttgaactgataatggattttcgatacttattacaaaatcctagtcaaggagaaataatgttattacacacattggaagaatgtggtcagaagtctatgcttgaacatccattatgtaaagcatttttgtacttgaaatggcaaaaaattcgtagattttattttgtacgtctggtttttgacgcaatttttgttttactcttaaccacttatgtaatgacagctttagcacatgattgttataataagtcaaaaaacctaacagacaaacaaaaaataactcatagtcaagaactaaacgaatcggagactcaaaatgcctgtcgtttaaatttgaatgtattagattcacaattaatatcacacataattatagaatttgtttggtatatattgttggtatttacaatcataataataatcagaaaattaattggcacaacaggatttacttcaatcaaacaatattttttaaacataacaaacattgttgaatggtttgtggttgcgagtgtttttttaacatcctttttatatggaagtaaaacgtatgactggcaaaaccctattggagcatttgctgttttgtttggatggtcaaatttaatggtgatgattggccagttacctatatttggaacgtatattgctatgtttaccaaagttcaaaaagaatttgctaaattgttgctagcttactcatgtttgcttataggatttacaataagtttttgcacgctattccctacatcagatgatttcaataatcctttaataggtatagcaaaagttctagtaatgatgacaggtgaacttgacatagatttattattgaaatctgaagaatctccaatcatttttaacgtaagtgcttatataactttcatactgtttattgtatttgttactgttgtattaatgaacttgctggtcggaatagcagttcatgatatccaaggtttgcacaaaacagcagatctctcaaaacttgtcagacaaactcaactaattcactctcaagaacaagcattatttcaaggttgtttacctagacgtgttataaatttttttaattggagtgcaagagttacaccatcagcgtatcgagttgtactttatgtaaaaccattaaatcctacagaaaaaagattaccaaagtacataatggaagatgcattaaatatagcaagacaacaacgattaaatacagttgactataaacaagctatgttagaaaataaaatggaaaacaaggctttagttgaagaaattaaacaactaaaagaaatagtacaaaatcaacaagatctcttattacagcttattaataaatcttcttaaatatttctagtcttaatttgtatttgttatgtaatttaaatattatataaactatgttatatttaaatagtatgtattgatatgttgataaaagtatttgaaaatattacttcattataatattgaagggtaaaatgatcttgttatgtttgtcatgataaattacctaataataaaccttcacatgttttttaaaaaaataataagagtattttgatatatgagggtcacatttttatttttatacgacattttcccttaactcaaaataatccaataagtcaatagttatgtatgggtaaaatgaggtaatattgatttaacaataaaataatgtaaatacgtaaataagataactttaacagttctgagttctcctgtcattagttaatacacagttgtgtcttattaagcatgattaaaatacaaaacttaattatcataaaaataataatattctaagcatgcacacatcagcaatttccgttcaataaggacacatttcaaatttataaataccacattgtgaatttaatttcttagtatttgatgtttatatgttgtttataaagttaatataaacaaaaaataagccagatcttagatttatagaattttgttagtgaaattaaactaaacgcaatgtgtttttgattactggtaaataaactaatttcaaacacccggttcttaaaaacaaataaaacgtctattatttatccaattaaatatacatacatgtataaatgtatatttatacttttataaatagacataaatgtgcaagactaatttgttagctgtatcttaatgctaaaaatataagtaatgaaactaaactaaatcaaccatacttataaagaataatgcattaatttatacttaaactaaaatgcttattgatttcttaga

SEQ ID NO: 39 - DNA, 3058 bp, Diaphorina citri
  wtrw-Dcit
gggaggtaacgtgtcgtgtttaaacttatgtagaagttcatagttttttgccttcttcaattcatggataaaatttttcatccttgcatgattctagactcgagagtaagaattaataataataatactgataactgataataataaaagaaatggaacagagttaaccagagtgaacacagctttaccgggaacaggttaagctaaaataaaatcagaatattctatccaaaaattcaggataaggtttttctaaaaaaaataaccaggattccaaaatcttctacattaacaaaggataaattaaattacttttatgcatagatgaaaaaaacgattgaaatgtaaacgaagtgacattgctaaaatttatgacttaatattgagcaaagtgaaataatagaaaatattgtagagatactaacgattctaacaaatttttaaaaatgacagtaataatttgaaagtggactaattgacctacaaatacatcatggagttggatgtgaagaaaaacacattggacaggagtagaagtttcaacaatgataccagatttccattggctctcatgagatcgaaaacatctaaaagttactcaacgaagaaagcaatgttcaatcaactgaacgatgagaaaccgaccatggtggacaatatgagaacagacagtttagaagagacaatatcagatgagctcagctataaagtttgcaaggaaagtataagagcatctctgttggaggctatgaagatgagtagtggcgatgtgaatgtactctatgccattgagaatagtctgtatgaacctgatgaaatggccaccctgtttagcaaagcctctcaagctgagaagacaacggcgttgctatggtgtgtgtttgtcaagagagaagacctgctggacgctttgcaccaactgggtgcagatctttctaatgacaagtatggggcgttacatttagccgctttcaatggaagtattaaaggttgctcgtggctcatgctacacgggcatgacattaacttcaccaaagactcttacacaccactacactttgcagttctaggtaactatgtagattgtgcaaagtttctaatcaagaacaaagctcatattcacgagacgatagttcactctgcagtgagtaccaatgcagtcgattgtgtccagttacttctatccctacaaatcaaccctaatgttctcaataacaagggtgtgtcacctctgcacatagctgcagataggggtttgatatcatgtctaaaagcgatattggacagtggtatggctgatgttgatatcaaaaccaaagagaggagagtgacagcattacacctggctgctgaaaatggctatgtggaatgtttgagaatcttattagaaaaccatgcgaactgcaacgaaagaaatcacaaggaacagattccgttacatctggcagccaagtgccagtcagtagaatgtatggagatgcttctgaggaaaggatctcaagtcaacgcttcagactgtgataacaggaccccgcttcatgcctcacttagtaagaacattctgtcagtacatcccttggaaattcttctcaagtggggagctaatgtgaacgctagggatatatttggttactctcccattcacatagctgcgttaagtgaactatctcaatgtgtcgattgccttataatgcatggagctgatattagttccaaaacgcctagtggttcatcagctctaagtataatcatgagaaacacaccatcatcaatcagtagtgtgaggaagaagttggattcatcaatcagcttgcaagatcctgaagcttctaccaaagacattgagctcaaattgaacttcaaatatattctacaaaacggaccggatggggaaataggtatgttgaaaatattccaaaacgatggtcaaaaagaaattctggagcacccgctgtgtgaggcttttctgtacgtgaaatgggagaaaatgaaaaaattctacctattccgattggtgctgagttccatatttgtcctcgtgttgtctgtctatgttctaacgacactcgcacaagactgttataacgcttccaaaaatattaccttgtttacaccgaccttttgcacaaaaaacagcgaaataggacatttcttacttcgtaatcctgattttatggagaccgtttggtacgtgcttgcactactggcaactatagaacttattcgtaagatatttggtctagtggagtatgcctcgttcagagaatattgttctcatgtgacaaatctatttgagtggtatatgatcattagtgtgttccttatttcttgtgtttatactaaaaggacatatatttggcaaaaccatgtaggggcggtggctgtattgttgggctggagtaatctaatggggatgataggccagttaccctctgtaggtacgtatgtggctatgtttagtagagtacagcttgaatttctcaagttatttcaagcgtatatttgtttacttgtaggatttacgctaactttttgtattgtttttccatctgaagatagatttcaaaatccaatcataggttttatcaatattcttgtaatgatgacaggagagttaaatgtaaatgaagttcttctaggcacagaggctaaacctccagtcctgctgaaaggtaccgcacacattgtatttaccatatttatgttatttgttaccgtagtcttaatgaatctcctagttggtattgcagttcaagatatccaaggtttacacaaaacggcaggattagacaaactcgtacgtcaaactgaactgattcattccttagaattagctttgtttcaaggatatttaccaaatagaatagttagtatgttgaagtctcaagcattgcttactccgtcttcatacactgtggcattaaatgttaaacctttgaatccaagggaaaccagattaccgaaggaagtgatgttaaacgctttagatatagctcggcaaagacgaatagatccacatttcatctgggcgtcagaggaaatcttcgatctggaataa

SEQ ID NO: 40 - DNA, 3069 bp, Pediculus humanus
  wtrw-Phum
atggaattgaacttcactaaagactacgatcagaagcaacccttcgatcgaagcataagcttcggtagggaattgtcagtcatcgacacaagtcaaaaatgtcggactccgtcatttttggaaaggttgaaaagtttcggagaagatagagcctccatgttgcaacggtcgaaacacattgatttggaggattcgtcatcgtccgctctcgacgatataatttttttggatagcttcgaagaaatacaccagaaaggagatgcaaacgttctcgtgtcgagagacgtcgttcgacaaaatatattggatatgatgaaatccggatccggaaacgttaagctgctgaccgatatcgaaacgggaaacacgagtgtcaataatattgaagagcattttgcgaattctagtcaatttgaaaaaaatgtcggttttctttggtccgtttttcaccggagaagagatctcttggattattttttgcaattcaacgtcgatgttaatttttccgaaccgcaattgggtttcactcctcttcacctgagctctttcagcgggtgtaacaattgcaccgcattgttgatatcgaaaggagcggatgtgaacacattgacgaacaaatacactccgcttcattgtgcagcttttggaaatgccgcgtcaactgcgaaactcctcctcaaagcgggtgccaaaatcgtatcggaaaaagtctgcaacgaaactccgattcactcggcggttcgatccaaagccgtggattgcttgcaacttttcatcaccgaaaatatggatttgagtaacatgggaggatgcgggtacagtccccttcacttggccgccgatttgggtcatttgcagtgcttgcaaattttattgaattcgaataaatgcgacatcaatttacaaacgctcgaacgaaaatgctcagctctacatttggcagccgaaaatggttattacgagtgccttaaaacattgttagaatacggtgccgactcgaatgcggtcaattaccgacagcaaactccgcttcacgccgccgccaaagtttgttccgaatcagtcgaattacttttaaaatacggtgccgatcccaacagtcccgacgcggataacaggactccgatgcacgcggccgtgtgtaaatgcgaatccgaacattcgttggaaatattagattatttaaccatgtggaagggtgacgtgaacagacgggacaaatacgggtacactccgcttcacatagcagctctcaacgagttgaccgagtgcgtggaatgtttaattctttcaggttccgacgtgacggcaaggacgagagggggaacatcggctttaagtataatttcgcgtaaaactccggcggcactcggtgccgtcaatcaaaaattggacgaatccattacaacgaacgatccggacgcatccaaagaaatcgtgttaatgtttaatttccggtatcttcttaaaaattgcaaacgcggggaagtgagttttcttcaaactctcgtcgacgaaggacaaaaggaatttttaagtcatcccctgtgcgaggctttcctccacttgaagtggcagaaaattagaaagtattacataacaagactcattttttgtttgctcttcgtcattctcctgagcctgtacgttttgacagctttagcgtatcaatgttacaacgactccgtttccgatgtttttccagacgtcgaagcgagaattttgatcgtcgacccggaactgtgcacgaaaaaatcttactttggagaattgttgaggagaaatccgataatcatggaaatggaatggttttttctagttttcataaccgttttggaaatatttagaaaaatctacggtttcagaggatacaaatcctttcggcattacatatcgcaaaagggaaacatcgtggaatggtttgtcgttttgtccgtttttctcatatctttcgtgtacacgggaagaacgtacatatggcaaaatcacgtcggagctttggccgttctttgcggatgggcgaatttaatgataatgatcgggaatttgccgatattcggaagttacgtcgcgatgtacacgaaagttcaaaaagaattcacaaaattgtttttggcttacatttgcctactgatcggattcaccgtttgtttttgcgtcatttttccaaaagccaaacaattttcgaatcctttcgtcgcggtgataaaaattttggtcatgatgaccggggaattagaattcgacagtttgctcgagaacataacgcaagaagaaagtcattcggcgacgctcttggaaatcagcgcgttgacgacgttcgtgttcttcctactattcgtgacgatcatccttatgaatttactcatagggatcgccgtacacgacatacagggattgcaaaaaacggcggttttatcaaagctcgtgggtcaaacgaaattgatcactcacatcgaatccgcacttttcaacgggtgtttgcccaattgttttctcaaactcttgcaaatcaccgctttgatatcgccctcgtcgtaccgcgtcgtcgtcagcgtgaaaccgttgaatccgagagaaacgaggttgccgcaggacgtcatgagatcgggattgaaagtggccaaacagaaaagagcaaagggaccgacaccgtcggcgagaagttcaatgagatatccgacgatgaaaaagcggaaaacgatgatgatgatgaacgaggaagtcattgctgacatgagaaacgctttgtccaaattgatggacgaagtcggaacaatcaaacgtttaataatggcgggagaaagaaatgatattttatttccgcttttactgacggacatgttgggaaaagtagacatagaatgcacggtagaaaatggcgggccgtcgggtcaagcaggtgctctaaggtatgcaatcagtaaaactctttacacgttggtggatgaaaacgttcgtgcgaaaatgatgttggcgggtttaacgcaaagggatataaggagaagagaaaggaaaaaacctggaagagatggagctagaagaagatatacctggttgaaacgatga

SEQ ID NO: 41 - DNA, 3856 bp, Dendroctonus ponderosae
  wtrw-Dpon
gaatgtgcttttggcgttcactttcatgattcggattaactgagcttttaaaatcagcatttcagttcgcacaattagagcgaccagcaaaccgtttaaattccattgaggaaattccaattggccatttattgttggatttctagcaaattctgtgaaaacaagctttgatgacttgattggccattgtgtataggaggcatacgatgtatttcagtttaatcagcgtttaaagagccagcataatgtgcaattattagtggggatcggcctgtggatattatcgaatacccatagcaaatgatggttgctgtgtaggtgcctctgtacaggcgcataaaccttgtgataaatggtgtcatctacagatgaacgagttcaaaccattaggatggacaacctgggctttcaggatccccatcgaaattccaaaaaattggaccaatcgatcatcgtgaatactgaaagccatccattatacatcaatcagacgcacgttgtcgttccacgatggcgaagatcgcaccatacggatccaatggcaatgctcgaagagcaatatccatcagaagactacgattacgagtatatggagtgtggaccgagtcctccagcagaccacatccataacccgtactatgagagctatgaggaggttcctactcatgaactgtcggtgcagatatgccatgatacgatcagaaataatcttgttgaacatatgaaagcatcatcaggcaaacatcattatttcgatgatattgaaagcaaaagaattgtgctggaaaacctggaagagtcgttcaaaggagcgaataagtttgaaatcagtatctgctttctatgggctgcgttcttgaagcgttgggacctacttgatggaatattgaagctgggagcccaattaaactattatgaacccaatcaaggtctcagtgcccttcacctcacagcgtttagcagttgcattccaggaacgcagtttctgatcgcccaaggaagtgatgtaaatgctatttacaaatggtacagtcccttgcattgtgcggcctttggggacagtcctgaaaccgcaatgatcttgctgaataatggggctagagttcaagccagaaccaatagtcccacttatagtaacgaaagtgccttgcactgtgcagttcgggccaatgctgtagcgtgcgttagattgtttacagtcgaaggtgctgatgttggcgaggtcgaattttctggcatttctccgattcatttagcagccgaactgggacaccctcaatgccttaaaatcatgttggaaacgaagggagtgaacgtgaatgctaggactaaagaaaaagagcaaactcccttacatctggccgctgaagggggaaacgcagaatgtattgatattttattggacagggaagctgatgccaatgtgaagaactacagactacaaacgccattgcacctggcggcacgtgcacaatcctatgacagtgtggagttgcttttggtaaagggtaaagccaacccaaatgtaccagattgcgacaagagaatttcgctacatgcagcagttgggaaaaccgcgagatcctacgacataatagaagtcttggttcgacatcaagcagatgtgaacgccaaagatcaattcgggtacacgccactccatatggctgccctaaacgagctttcccaatgcgttgaaaagcttttataccacggtgctgatgtgacggccaaatcgaaatacggaaatacagctttggggattataatacggaaaacgcccgcttctctagtgatggttcgtcaaaagctggaccaggcgatcactttgcatcgtcatcccgaatcctcaaatcgagaggtggagctgaagctggacttcagaagcattttacagcactgccaccccagagagataagctttttaaatacgttcgtggatgaagggcaaaaggagattttgctccatccattgtgttcggcgtttttgtatctcaaatgggagaaaatcaggaagtattacatcgctcggatgttgttttgctttatattcgttttgagtttatcgctctatgttctgacggctttggcacacaattgctacaaccatggaaagaatatgaacgatacgcagccccaaaatgtgatcgaactttgcgagaagaagtccatgatgggacacatgttgaggaacaatccgtttgtgatcgaaatgcaatggtttgcgttggttggcataacgtgctgcgagattttacggaaagtgtacggcattgcgggctatccttcagtcagacaatacttatcgcaccccgaaaacattatcgaatgggcggtaattacaagtgtgtttgtaatttcgttcgtttatactggaagaacgtacacttggcaaaaccatgtaggggcctttgctgttctgtttggttggaccaatcttatgttgatggttggacagttgccagtgttcggcccgtacgttgcaatgtatacgagagtgcaaaaggaatttgccaaactcttactagcttactcctgtctgctgataggtttcaccatcagtttttgcgtaatatttcccgattcgtccacttttgccaaccctttcatcggcctcatcacggtcatggtcatgatgtccggtgagctgagtctcgatctactggttgatgacgatccggaagatccgcccttcctcttggaaataagcgcgcaagtaacctacatcatgttcttgctgtttgtgactgtaattctaatgaatctccttgtcggtattgcggttcacgatattcaaggcttgcagaaaacggcaggtttatcaaaattggttcgacagaccaagctcatatcctacattgagctggcgctgttcaacgggtatctgcctaggtacttgttgaatttgctacattggacggcactagtttcccctaaggcctacagggtagtgctgaacgttaagccactgaatccgggcgaaaaacgtcttcctaaagacattttagaggccgcctatgaaatcgccaaacggggcacgatgtatggccaaggggcggcacagaatagtttcaaaatgaacaacaacaatattatggaagatctgagcggactgtatgatattggcgattctgcggccatcacgcctttgcacaacaaagtcgatcggaacgccgatatgattgacgcattgggcaaagaaatcagggaactcagactggtgctgaataaaaacatgaaactcttggaacaatacacggtggttcacaggaaaaattccgttaagacggctaacaccagttagttacgctctgctagttaatggacaaatctgtgatttcgttttcaatcaagttttatttgtatgagcttcatacgttcaatagtcgaaatatttaatttgtaaaaaatgagtttggaataattgttcgggctgttttccagttattgctaattcttttaaaattgccatttacattgtaaattatcgcaagtagcaagcaaaaacttggaataaaaagttcatattccattaaaaaatatgtctaattaatcgtaatgtatgcatagctttataatggttcgtaggtgcctttgtctgagactacttttctgatttctaattgatttgatttttagttttattttattagctgtatctagatcaagaacgatgtcttttccactataacacgattccggttcatactaacattaaatcatgccatttaatatgtgatattagtgatttagcggttgtgaatgttaactcgttttacctaatcgtaggaactaactactctacatacattttattgtaaaattaatatatttctttaataaaattaagtgaaca

SEQ ID NO: 42 - DNA, 8110 bp, Leptinotarsa decemlineata
  wtrw-Ldec
aggtatccagcgtcgcgttactgctctgaaatgaaaagaacccccccacgccagattctttaagagaacgtcttctaaacggcaatttagtaatttgtgttgttctcagttattcgcagttagtttggttttcgttggcttaccacgacctacgcgaaccgatttttcggcggtgatttgcccccccatgcccccacccgaatcgaagtcgaattatcgctaagctgcaccgatttccgtaatgaatgaaaatggtaccttttgttgggatgcgtatttgcgtcgattacgttcgattacatggttctattgtgcctaaataattaggtgtgttgttacaatggtgagaattattcagtgttcgcaatttggaattttttcgtgggaagattcagtcggcagatttctatagtggcaaaatggtttatgggtcagaaaaccacaagcctttcggaatggataactacggctttcaagattcctcccataagaaacttggccggtccgtcagcgtcaacgttgaatcttccaacttacccctttataaaaccaccacttccaacaccctcctcggctggcgacggactcgggacgatcccgaagacatcttggaagaggaacttccttcagatgacttcgagtacatggaatgcggaccatcacctccagcagatcacactcccaacatctacgaaagctttgaagaattttctaccagtgccgacttgaccgttcaaatatgtcacgacacaatcaagatgaaccttatggagcacatgaaattgagttctggcagacatcagctattagatgacattgagaataggaaaactacatccgacaatttgaatgaggtttttcacggtgcatcaaaaattgaaatcaacatagcttttctctgggcagctttcatgaaacggtgggatttatttcctggcctattgaaactaggagctcaactgcgttatcacgaacctagtcaaggtctgagcgctcttcatttaacatcattcagcggctgtgttgacggaactcagtatttgatatctcagggatgcgacgttaacgctcttttcaaatgctatactcctttacattgtgcagcgttcggagacagtcctgagtcagctctcgtgctccttaataatggcgctaaagtgcaaactttgactaatagtcctcacagttgtcacgagagtgtattgcattgtgctgttcgcgccaatgcaattgcctgtgttaggctatttactcaagaaggtgcggatgtaggacaagttgaagacactggagtatcacctgtacatcttgccgcagacctgggccacccacagtgccttaaaattcttctggaatccaaaacgttcaatgtcaataccagaactaaggaaaaggaacagactcccttacatcttgctgccgaaagcgggtacgtcgactgtatagaaattctgctagatcacagagcagatgccaacctcagcaatcatagagaccaaactccgttacacttggctgctagggcccaagcatttgactgtgtggaactacttctgaggaaaggaaacgctaatgccaacattggagactgcgatcaacgtacgcctttacatgccgccgtaggcaaagcagctagatcttacgatataatagatatactgttgaactacggagcagacgtcaacgctagagaccaatacggttatacacctttacatatagcagctttgaatgagctgtcgcagtgtgtagaaattttaatttaccatggtgccgatgtgacagccaagtccaagtttggaatgaccgctcttggaatcataacgcgaaaaactcccgcgtccttaggtatggttacacataagttggattccgccataacattacatcatcatcccgaatcttccaacagagaagttgagctcaggttggacttccgcggaatactccagtactgccatcctcgagaaataagttttctgaatacttttgtagacgaaggacaaaaagaaattttgttacatccactgtgctctgctttcttgtacctgaaatgggaaaagatcagaaagtactatgtggccagaatggtgttctgttttatatttgttttgagtctttctttgtatgttctgactgctttagcccacaactgctataaccacggaaaaaacatgaacgatacgcaaccacagaatgtcatagaactttgcgagaagaaatctatgatgggtcacatgctcagaaataatccgtttgttatagagatgcagtggtttgttctagttgggatcacctgctgcgagatactcaggaagatatacggtattgccggatatccgagtgttaagcagtatttatctcaccgcgaaaatataatagaatggacggtaattgtgagtgtgttcgtcatttctttcatctacacaggaaggacctacacttggcaaaaccacgtaggagcttttgctgttctattcggatggactaatatgatgttgatggttggacagcttcccgtttttggatcttacgttgcaatgtatactagagtacaaggggagttcgcaaagttactactggcatattcttgtctgttgattggcttcaccattagtttttgcgtcatgtttcctgattcgtcgacttttgcgaatccattcatcggactaattaccgttatggtaatgatgacgggcgagctcagcttggatttattggtagacgacgatcctgaagatccgccgtttttacttgaagttagcgcacaagtcacttatattttgtttcttttatttgtgacggtaatattgatgaatctcttggtgggcatagccgttcacgatatacagggactacaaaaaactgcaggactatccaagttggtgagacaaactaaattgatttcctatatggaattagctctgttcaacggttatctacctcagtatttgcttaacttgttgcactggactgccttggtatctccgaaggcgtatcgtgttgtgttgaacgtgaaacctttgaacccaagagagaaaagacttccgagagatatactgaaagccgcccacgatattgccaaaaaacgtaaacgattcggaccgactgtgtcgactaacggcacaattgtgacatgtgcaaaaaaaataaacaataacttggatcaaaatagtgaaattttagaatataataatacccttccattgttacagaataaaatcgatagaagtgctgaacaaattgaacatttgagcaaagaaattcaaagtttgagaagtgcctttgaagctaatcagaagttgattgaacaggtgttgaataccatattacataacagaaaaaatagcaaataaatgaactgtgctcttatatggtcatatagttttcaatgcatatattttgtattatttgcaaaaagccataaaatgtatgtaagaattagtttttaaatagttgcttgttattttgtataggttagaaaaaaatatacaaataaaaatcaaacttgtgacatatttggttaagagagtaatttatttttgatgaaatgtaagcagagttgcacagactttttatgtgaatttaattcacaaatcacaattccgtgcccagctaaaacttcaatatcatttttactcaaaatatttttactatttcaaatccaattttgattgttgaatttgaaatatgacttggttttattattttagaaatgatttgaagccactaggaattaattatgaatccaattcaagaaaaacaaatcacaattctttcactcagatttttttgttgattttcaaattggagaatatggaacaaatgtttttttgaattcaatatgagcttattggaaatagaaactaacaggtgataatgcaactttcctattcaatactaacatgagtgtactcagtaatcagtaccctttaagaattatttttgacttggtattccaggtgattgaaattttaaaaatatatctgaaagaatagaatgattgacagcttcttaaatcttgtgcttgcttccaggttacaactcgagacgattaatttcagttcgattttttgtaaggatttaactattcattattcaaaatgtgatattagatagataggtaccatagtaactatttaatcatggcataacattaaaaaattatgggatacataaaactattgaatgatgattccttttttgtgtggttggtttatttacctgtacacttctgtataataataaatagtcattcattaaaaaaatagggtttttttgacttgactatctcacatatgatcaatacgtttttccatcctgtggcgctttctgacataaattacaattattttgatatagtgaggtaatgcatacagcaggccttgaagataagaaagtagactgagtcaagcagccccttcaaattaatcacagtagcattcaccaagagaacatggaaagaggaacttcgagataaacacattacaactgtcggggggaaagtttgaatatccgaaagtgatgttagatctcagttgggttgaaaccaacatctaaaaaaaataagaaaaagtggaaacctaaggtcaaacatggggatttaaaccatacatgatataatggattatacaaacaataggtcaatgacctgatagcaaaatatgacaaaaatgattgctattaataatataggacttgcttgtataggaatagtgggaatagcagtacaaaccatacctcatgcctttagcaacatttgagactttcttcaatccacccattttatattttgtggaaataagagatgtaaaaatagataattacctagctgactcgtgattgacttgattaatggatgatctcatttactactttgcttgttctttattattgtaataggtaaattcttcgaaaacatagaagaaaaccaaagtttagattttatgctcaattttatttgttgttaattaatcgattgttgttgatgttgtgttttccaatctttgcattcgtaaaaaaagatgtcgagatcttcatataatagccccgtgtttgcgggactgattatgatgtctcctgatattgacaatatctgccaatattcatagaatattctatgaatattggcagaaagaaaaattcatagaaattgtaagagtgtttggatgtagtccgtcactctctcaattctggctcgcttcaggagatcatttattcaagtatatcgaccgctatccatgatgatagaaagtactttattttgcatcctttccagccattgaagaggtgttttctttaggttgcaaaatattggacaggcgtatagcattgctgatctaatcagctttttgtatatcaatacttcgttattggtgctgagctttgaatttctggcaataagcgggtaagtctgttttattgccgctccagccctctgtatggctaggctgatatgtttatataaatctacataacacacccactcggtcaatatacattgttttccaggcggaagtgtacgcaatccatcaatggacaattatttgaggcctcgacggaatgttgggcggcactttcagtatttttaaacccgagattaacatcctgactgatctgggaataccatgaagtaacagaactgacagacagtaatggatggactcttcactggttatcggaacacccataaagattggaaaggaaaacaaagaaacgcttcaacagagcgggaattggatcagaataattataagattacttactggaaactgttcgcttgaaggataacaaaaaagtacaacaaaattgatgtaatgagtgttatgaaaatatggaaggaaaaacgtaataaatcatctttggttgatgttttgaactagagaatttcgactctggaattatggattttttaaattttgactaacgaccttagcaactgaccagaacggttacactgtcgaataattcattaacaactcttttgttaatcagctctttagtttccttctatttttgacttgaattgactgcaaatattatcaaatctgtcagtttttggtgctagtattttttatcactcactttaaatgagatagatatttagaagtggtagttttgttgaaataaaatgttgctgttatgaggctatgtttcaatccctgataaaagaattaccttagctaattcaggcacgtataccgatggatattcagagttgaatcaaatactggatccaagatcaaaacccctccttgaaatattttcataagtaatttcccagcagtagaccgcagcccgtggtatatttttatggaatcatttgatacctctaaaaattgtatgatttctattagactgaagtagaagatgagcctcagcatatgccgacacttgtatgtggtacacgtgaaaatttcagaaaaaggagtaatttgccaaacgttcttggacggtttttatgagtctaatataatactaaaaacacattttctagaaaatgacctctttgtgcatagttgataacaaatctctatcaaaaacagtaatttattttgttatgtcatacaaattagtagtctcaagggaagtaaacattaggttaacaaaataaaaataaataactttgaaccctaattctaggatgatctaggggtggtctgacataaaccaacttatttataagacatgactacaaataacctttttgatatgaaaaactacttttgtaaaagccatacgggtaagtacctttgcatatagaagtcatttttcgaagatttttgagtaggtacaccacctacaactgaaattcatctttttacttccaggtctattgaaatcatattttcaagaaatcctaaaatgcagaataggcttatgggactacaagtcgtgcctattattcctaatttctcgttttaagtaaacaaatatttttttttcttacgagtcaaattgaaaagggtcattatattccaaaaatgaagttaataaattttcagtgtattatactggaagagtaacaggatgatctagatgtacagcaactatacattcgattatttgtaaacatattccttttacagtaattcacaaaattaaataatacaaatgtcaaaaactgcattgcttgttatgaaagagaagattgatcataatgctttagtttcatgcaaagaaagagttttgtttgtcacctatgttgataaaagcttgtttcatagttattttagtttgaaattcttcttcaccaaagtaagcgattaattctatattccattttctgaataggggtttcatctactcattcatgtcccatcactgatacatataacaccatgtggaaatacatggtctaaagcagaggtcggcaagtagatttaggtggggtcctgatactgtgggaaaattttgacgaggtccagaaaaaacaactgataaaaattaagtgtatccattgtataattttgggccaaacatgtcccagaagaatatgaaaactgttaagagactagctatcaatttggccactatgtttggctcgacatacatatgtgaaacatctttctcaaaaatgtattttttgaaaaacaaatattattcgagattaacagacgctcacctagaagacacacttcgaatttgctgttcctctcgaggaccaaactataaaaaactggctcaagaccgtcggtgtagtttctcactttaataagaggtcttgatttcttttataactcacaatgtgatttgaaaccaaaataatatgtagcactttattattaatatttgtttttttttctggaccccgttaaaattttccaacagtatccggatcccacctaaaactacttgctgaccccaaaaaactgcagaaactcaagtatatcaagttggtatattgataaatttgttcgaattagagaggtgaaaacgacataggacagtcgaaaagccaatatggcagcagtttaataaatcttttctgctccctgtatgctcaatatcaaggcccttaattctactcaatatttctgtgaccacaataaatcgactgaatattattttcctttagtgtgtgttgatattaattttcaactcattccat

SEQ ID NO: 43 - DNA, 4602 bp, Tribolium castaneum
  wtrw-Tcas
tactcgttgacagcctaacgttattttaacgattgaagtaataaccttctcgtttttattcgatcgataatcaaatagctttataacaaaaatcgttattatttcgattctcgttaaatagcgatatcgttataaattacaaaataggcctgtaaatattgaattgttgagctagtttttgatttgtttttttatgtgaagacaggtttttttgttgtgtttttgcaacttttaactcaaaatttctttatataattgtaatagactttgtagaactaatctcagagatcatatttgcttacaaattttgttgaagttcgcgctgaattcgctgaaaaactgaaactgctataaacatatgcataaggaaagttgttcttttgacttcttttgaactctactatcacgccttcaaatatttgcacaactgtcaaattctcccgcaaacggttgaaaatcgagatatgatatcgccaagactcaatgattttaaaactatgacgggcattttttacaaatgaataaaaagtaatatgtacggggtgttaaattcttgctaatatcacaatcttttctgtgtgtatcaaaaatgggttcagtgtgatagttgtatctcgaattgagggaattcccgaacattccgacctcaattatcgcggtctgtggcagcgtctgtgcctgtcctagttgcgtcccttccgtcattgtcattcaagcttcttttccttcgttcgtccaattcgggtcaccattgctcaatcctccgactgttgtgatagtccactttagttagttgggccaagtcatcactttccaaaagaggtcaaaaatcttacataacactaactgcaaggtcggtgcatcatcaccaaccagttcttgcacgaaaaagaggggaccaaaccaagaaatccggcaatctcgccgcgatcccatcccataaacattattatcattccgaactcacgtgtagttaagcatctcccttctccacggaggttcaaagagactctttacgaagcaatttaacaatttgcgttattcgcagtagttatgccagtctgtcgcctacgcaattcgaaagcctgcgattttaccggttggatttttctcaggaatccaagaactgttagtgctgcggtcgcttctgttccggcgttttttttccgaatgagttttcagtgcggcatgtgaatcgatcatgatttcatctaattgtgtaagtgtattgtacggtattgacaattacaacggactcaacaaatgtgcccaacgctagttgagggatcgcatgtggaattttttatgtgggaagaaggcgaattcagaaggtgcggatggtaaatggttgccgccacagataaccacaccacgaaatccctaaaaatggacaatatgggtttccaagactccaccaactcccgcaaactgggccgctccgtcagcgtgaacgccgaagtggagagcttcccgttgtacaaaacacacacgtgcccctcgggcctccggtggcggcgcccccgcgacgacccggagatcgtcgtcgaggaggagttcccctccgacgacttcgagtacatggaatgcggcccttcgccgcccgccgaccacacgcccaacatctacgaaagcttcgaggagttctcccggagcgagctcacagtgcagatctgccacgacacgatcaagatgaacctcctcgaacacatgaagatggcctccggccgccaccaactcctcgacgacatcgagtgcaaaaaaaccacgcaggacaccctcaccgaagcgttccaaggcgccaccaagctggaaatcaacatcgcgtttttgtgggccgctttcatgaaacgctgggagctgctggatgggctcctgaaactgggggcccaactgcgctactacgagcccagtcaggggctcagcgccctgcatttggcctcgttcagtgggtgcatccccgggacgcagttcctgctagcccaagggtgtgacgtcaacgcgattttcaagtgttacactccgttgcattgttcggcgttcggggacagtcccgaaacagcgatgattttgttgaataacggggcgaaagtccaagctttgaccaacagtccgaataactgccacgagagtgtgctacattgtgcggttagggcgaatgccatcgcgtgcgttcggttgtttacggcggagggggccgatgtggggcagttcgagttttcggggatgtccccagtgcatctcgcggccgatttggggcacccacagtgtcttaaaatcatgctggaggcgaagggtgttaacgtgaacgccaaaacaaaagagaaggaattaacgccgttgcatctagccgccgagggtggttatgtcgagtgtgttgagatacttctggacaagggggctgatgcgaatatacggaaccatcgggggcagacgccgctccatctggcggcgcgggcgcaagcttacgattgtgtcgagatgctcctgaggaagggcaacgccgatccgaatatcggtgatttcgacaagagaacgcctctgcatgctgctgtctgcaaggcggctagatcgtacgacataatcgagattctggtcagttggggggcagatgtcaacaccaaagaccagtacggttacacccctctacacatagccgccttgaacgaactgtcacaatgtgtggaaatcctgatctatcacggggccgacgtgacggccaaatccaaattcggaatgacggcgctgggtatcatcacgcgcaaaaccccagcgtcccttgccatggtcacccataaactcgactcggctataactctccatcaccaccccgaatcctccaaccgcgaggtggagttgcgcctcgacttcaggagcatcctccagcattgccacccccgggagatcagcttcctcaatacgttcgtcgacgaaggccagaaggagattctcttgcacccgctctgctccgcgtttctctacctcaaatgggagaagatccgcaagtactacatcgcccgcatgttgttttgtttcatcttcgttctgagtttgtctctgtacgtgttgacggctctggcccacaattgctacaaccatggtaaaaacatgaacgatacccagccgcagaacgtgatcgagttgtgcgagaagaagtccatgatgggccacatgttgcggactaatccgttcgttatcgaaatgcagtggttcgtgctggtgggcatcacctgttgcgagatcctgaggaaggtgtacgggatcgcgggctatcccactgtcaagcagtacctctcgcaccccgagaatataatcgagtggactgttgttgttagtgtgtttgttatttctttcatctacaccgggagaacgtacacttggcagaaccacattggggcgtttgccgtgttgttcggttggaccaatctcatgctgatgattggccagttgccagtgttcggctcctacgttgctatgtatacgagagtacaaggagaatttgccaaattactgttagcctactcatgtttattgataggttttacgataagtttttgtgtgatcttcccggactcgtccacgttcgccaatcccttcatcggccttatcaccgtccttgtgatgatgacgggcgaactgaacctggacctgctggttgacgacgacccggaggacccccctttcctcttagaaataagtgcgcaagtcacctacatcctcttcctcctgtttgtcactgttattttaatgaacctgctggtgggtatcgccgtccacgatatacaaggcttgcagaaaacggccggcttgtccaagctggtccgtcagaccaaattgatttcgtacatggagttggcgctgtttaacggctatttgccgagatatctcctcaatttgctgcattggacggctttggtgtccccgaaggcgtacagggttgtcctgaatgtgaagccactgaatccgagggagaaacgcctcccgagggatatactaaaagcggcgcatgaaatcgccaaaaagagaaaacactacgcacatacgatttcctcacatggcagtaacgctactactaggaaaattattaacaataatatggaccagaatagtgagattttggaatatccaagtgcctttcctttacttcaaagtaaaattgagaaaagtaccgagcaaattgaacatttaagtaaagaggttagggagttgaagattgctcttcaaaacaaccagaagattatggaacagttgttgcatggcttagtgaatacgaagaatagctcaaattgttagaaatgtacagactgtgatgtattttatattagattttaatttaatgatataagtaaatatacgtaaaagatgttatttatgttattctttattttagagattaaattttatcttgccattaagcaatgtgtgatattagtgaaatagtggttgtgagattaattttgttatacaaatagtgtctcgtattgtcatacttagttttacaatgcttcgtatcacagtattatacttcaagtgccttctactgacaataacagtatattttacaccttcaataaagtggcttgtgaagtagcttatctttttaaa

SEQ ID NO: 44 - DNA, 3483 bp, Plutella xylostella
  wtrw-Pxyl
ttaagtaccttaaaggaaaatgtaggaataaccctgtaaaccttgaataataaaatgctcattaaaagttcaaaaatacctgcaacatggaaaccctgtaatgttttgtaattcaggcagaagataagagaaaaaaatataacctttccatacgcaaattcttcactgcgaaatcaacaacgtttattgaccgagcgcgtagtaaaaatagcttaataaatcacgtcagacacgagatgtgagttgtctaagcgcatcacaaacagtagagagcacacactgataagatatggagcttcacctcacgaggcagtctcggcggagcgatggacaacttcggttaccgcgagatgacgtggccgtccccgcagcagacgcccacgcggccgcgattccagcgcagcagcagccgctactcgaccagggaacccgaggagttcccgctcaacgatgccaacgtcgtctacagacagtcccggaagatcgacttcctggaaagcgacaaggacccgggcagccccatgcccaataaagagtacatcttcgtgggaccctcccccccggctgatgatgctcccaacatgtaccagagcttcgacatccgcgcgccggacccggaggcgcggctgacggaggacgtcgtgcggcggtcggtctgcgagcgagcgctcacgctgggcgccggaagattcttcgacgacattgaatgcggactgatcactgcacaaaatgtagaggagcagataggttcagcgcctgaagtagttgttaacctgaccctgctgtgggccgcgttcctgggcaaggacgagctgctgccggccatactggacgccggcgccgacatccacaactccgagcctctgggactcactgcactgcacttggccgcgtacagcaatgccactaaagcagcgctctacttactgtgtcgcggtgctgatgtggattatgtgccgaaatactttgctccgatacattgctccgctttcggcaatgctttggaagtagctgaggtgttgatagctaatggtgcttctctacacgctgtggtgcagcgggctggatgtgaagacaacctagttcactgtgcagtgagagccgatgcggctgagtgtatggagttgttcatagaaaggggcgtcgatccagcgtatgtgacttctggaggattaaacgctttacatttagcagcagacctcggagccctacgttgcctctcatatctgattagagaaacaaaaatcggtgtaaatggtatgacaaaacagagagacaaggaatgcactgcattgcatttggctgcgtccaaaggaaacactgaatgtgtcgagatgcttctcattgaaaatgccaaggctaatacaagaaactatcgcggatttactcctctccatctggcagcgatgtgctctagtgtcgagtgtgtagaagtgttgctgagggacggcaatgctgaccctaacgctgaagatgccgacaagcgcactccgctgcacgccgccatccggccctcggagcgcgcctgcgatattatagacacgcttatcagctggggcgctcaggtgaacaaaaaagacgtgtatggattctcacctctacacattgctgcaatggacggaatatcacagtgtgttgaaacgcttatttaccttggagctgacgttatctctaagtcaaagagaggaaacacagcgctgagtgtaattgcgagaaaaatgcccaagtccctcgctattttaaggcacgacttagattctggtatatcactgagccgacaaactgaggcgaatgaggaagtacagatagaatttgactttggacggatactgaaattttcatatccccgagagataacgtatttgaaccatttagtagatgaaggtcagaaagatattttgttgcatccgctgtgctcggcttttttatttatgaagtggcgaaagataagaaagttttatttagtaaggttgatcttttgttttctcttcgtgtcgtttttatctatgtacgtacttgcgactgttgtgaaaacatgtgatggaaagttctctgaaaaatacggagtaaagaatgaattatgccagaaacaatcgattctcggtgggttcctggaaggtaatcccatcgagatggaacgctgggttctaatctccataacagtgatggaaatcatcaggaagttgacaggcatcactggatactccacattcagacagtacgtcaccacctttgagaacttgttggaatggtttgtgctgctatctgtgttttctctgtacagtataaggaaggactacagttggcagaaccatgtgggagggtacgccgtgctcggtgcttggaccaacctgatgctgatgatgggccaactgcctatgttcggtgattatgtggccatgtaccagaaagtgctggcagagttcttgaaactgcttctagcttatgtctgtctgctccttggtttcacaatatgcttttgcgtcgtatttccaaatgaggaaatgttttcaaatccgctcatgggcttcataacaacgttgtctatgatggttggcgagttaaacctgagtattcttataaacgatccagttttagacgatcctccattaactttcgaattatcttctcagttcatcttcattttgttcctcatgtttgtgactattatcctcatgaatttgctcgtcggtatagccgtccatgatattcagggattgcggaaaactgcaggtctttctaaactagtccgtcagactaaactgattctgtttgtagaaatgggcatgtttagtgcactgttgccgaaattccttctcaagttcctgtacagaaccgccttggtgtcaccagaggctggcaaagtgatcttgagtgtgaagcctctgaatcctagagaaaaccgtctgccaaccgacatcatgatggccgcgtacgagctggcgcaactcaacaaggtgcagacagggaaatcagtgagagaggtgttgaaaatcaacaagttctcgaaaccaaagaaagagagtcagacgccagacaacaacatcaacgtggagatccgagggatgcaggagaaggtggaccaaaccacgttcaacctgaagaagatcgaccaggagatgcgatacctgaacactctgctgctggaacaacagcagcttctccagaagctggtgaaggtggcgtcagaccggcccgcgcagtacctgcccatagagccagcgtaccctgaatctcccgtgttcatctccagtaattctttggaaaagtaatgaatttgtcgttcggctgtgttttgttttttttttgtaagtttgttaagctagttttaggattgatcagggttttgaaacaaaataggtatagttatgtgaattgtgtaaactacgtaagctttttagacaccttaaaagaaaataaattaactataaatctaatctaattaatattgctattaatacaggtaaatattattataataag

SEQ ID NO: 45 - DNA, 3952 bp, Trichoplusia ni
  wtrw-Trni
gatgtttacctaagtgtaaaagagatagaacgataaacaatggatgttataaataacgagacagttcctgcgttagtgccatatattttgtgttaattgccgcgttatgtcgactgaaagaaaaaagttttcaagaaccaaaagataacattatatttggcggctaaaacattagtgttatacaattgaataaacatgcagtgatgtaagaatttgcttcttcaaaaacccgcagaaaattaatcttaatataattgtgcgtcgtagtaaaaatagctacgtaaatcacgatgtcaaacacatctcagcgtgtctgagctctcgaacaacaaacgagataagataacggccagcgtcagtagtcagtcacgtttcgaccatggacaacttcgggtatcgcgagatggggtggccctcacccctccagacgccgacccccacaccctcgagattccgcttctccggcagcgtgagatcaagaacaccaagagaacctgaagagtttccactaaactccagctataaaccaaacttcgatctgttggagtccgccagagaacctggaaaagctaaagaatatctgttcgtgggcccgtcgccacccgctgaagatgctccgaatatgtatcatagttttgatgtcctcgctccagaccctgaagccaggctaacggaagatgtcgccagacgaggcctgtgtgaaaaagctttgagcctcggagcggctcgattctttgatgatgttgagtgtggtttgataactacggataatattgaggaacatataagttcggcgcctgaagtggtcgtcaacctgacattaatgtgggctgcatttctcgcgagggatgagttgatgccagctattttagaagcaggagctgacattcactattcagagccagctggactgacggctctgcatctagccgcattcagtggtgcaggtagggctgctgttttcttattatctcgtggggctgacgtcgattttgcaccaaaatactttgcgccacttcattgtgctgcgtttgggaattctttagaagttgccgaaattctaatagctaatggtgcttctttacatgccgtggtgcagagagccggttgtgaagataatttggtacattgctcagtacgagccgacgctgtcgagtgtatggaacttttcattgaaagaggtgtagaccctgcttatgttacgtcaggtggtttgaacgctttacatctagctgctgaacttggcgctcaaagatgtctgtcatatttactgaaagaaacaaagataagcgtgaacggcgtaaccaaacaaagagataaggaatgtacagcgatacacctggcggcggctagaggatatgcggaatgtttggagctcttgttatctgaaggtgcaaaggcaaacacaaagaactacagaggttttactgcattgcacttagcggctagatgttcaagcatcgagtgtgtcgaggtacttcttagggacggaaacgctgatccaaatgccgaagattatgataaaagaacacccttacatgctgccataggacgagcagagcgtgcatgtgacatcatcgacatgcttgtaagctggggtgcacaagtcaacaagaaagatgaatatggatactctcctttacatttagctgctatggataaccttactcagtgtgtagagactctaatattccttggtgctgatgtcacatcgaaatcgaagaaaggccatacagccttaagtgtaatcgcccgaaaaacaccgaaatcactagctatacttagacataatttagattgtggtatatccttaaaccaaccaagtgaagcgaacgaagaagtgcaaatagagtttgattttggcagattactgaaattctcttatcctcgtgagatcacatatttaaacagtttgattgatgaaggtcaaaaagacatattactgcatccgctatgttccgcgtttttgtttatgaaatggaagaagataagaaaattttatttggccagacttatattttgctttctctttgtatcgttcttatccatctatgtcctaactgcggttgtgaaaacttgtaacggtaaatatgctcagaaatacggtgtgcttaatgaactgtgtcaaaagcagtcgatattaggtctcatattaacaaacaatccgatagagttcgaaagatgggttctaatggctatcactgcttttgagattcttcggaaactaaccggcataactgggtactcaagtatctatcagtactttgcgaccttcgaaaatttgatggaatggtttgtcttgctgtctgtattttctctgtacaaaatacaaaatgattacagttggcagaaccatgtcggtggttacgcggtattgggggcctggacaaacttgatgcttatgatgggtcaacttcctatgttcggtgactacgtagctatgtatcagaaggtgttaacagaattcttgaagttactattagcttacatgtgccttcttttaggtttcactatttgcttctgcgtggtatttccgaacgaagagatgttttcgaaccctctgatgggctttataagcacattatcaatgatggtcggagagctaaacttgaatattctgataaatgatcctactaaagacgatccgccattaatatttgaattgtcagcacaaatcatattcattctattcctcatgttcgttaccatcatcttaatgaaccttcttgtgggtattgctgttcacgatattcaaggattacgcaaaactgctgggttatctaaattggtcagacagacgaagctgatcctattcgttgagatgggtatgttcagtgcttggctcccaaaatgtctacataaatacgtgtatagaactgcattagtgtctcccgaagctggaaaagtaattttgagtgtgaaacctcttaacccacgggagaaacgattgccgactgacataatgatggcagcgtacgaactggcgcagttaaacaaagtgaagtcaggtagatcgatcaaggaaatcttgtataagaacaaatacacctcgaaattgaagaatgaaggtcagttcgcgaacgaccataactttagcttggagatcagaggcatgcaagagaaaatagatcaggcgacgttcaatatgaagaagattgatcaagaaataaggcatatgaatacactgctaatggatcaacagactcttctccataatttcttcaagtataccgatctgattccttaccgagctcctcatccatccactccgatttattcaccagaatcaccagtattcttcaccagtacaagccagagtcagcactctgacagcatcaagtaaaactaaagcaaaccgaataaaggaaaatcagctttattcaaaagaggttaacattcaaaattgcgatgatcgctatcagaaacatccggcaaaagaagaaaatgagtgcagattgtattgtatggatattctgtgtttagctttaaattaaaatttaatcataactatgatattagagatgagaaaaagatgggaaagaaatatttttaaaccgtttatgtgtcagggtattaggatttttataaaaaagtttgccttttgtctttatcaacaacattttcaaatttatcaagttatttttgctgtcgaaggaacagcattaaaaatactttatgacatggcgatagctcgcagataggaacaagtgaatttaggatagaacaaataattctgtaataatgtacgcgtgaaataataatcttgccaaggcaaacgccaggaacgtgttacatactttaaattaagtaatttgtttgtacagttttcgtgatcttagtgataagagtgtttcggtaaatagagtacttatggaagccactattggctgacaagatgaaaacattgtcaacgttatcgcgttcgcatttaattaaatcttattttttataa

SEQ ID NO: 46 - DNA, 2931 bp, Amyelois transitella
  wtrw-Atra
atgcccacgacgcgccgcctactctcctcgcggtggttccgtacgcgccgctccccaaaccctgaagagctcgatgacgtccgacccaggaccctccccaggagcgacatggaccgcagaccacgagtctcccgagtcctcagctccccggcgagaacacaacaccaatcacatccacccctcgatgaagaatcactcgagagggcctacccttccatgggccacctcgagtacgtcctcgccggatcttcgccaccggcagaaagcgcccctaatatgtacgacagcttcgaagaaccacctttggatctaactgcgcatatttgcagcgactccttacgtcaaagtgcgcatgaacagatgagagcggtcggaggaaggttgcggctacttgacgaattggaatctggtgtactaacggtggaatctgcttcggaaacgttctcaactgcttcggaagccgaaaagaatgtgtgtttattctgggcggcgttcctcaagctcgctaattggttgccgccgctggtcgaggctggcgctaacccgctatattacgacaccttgggactctccccccttcatgtcgcagcgttcagcggatctacggaatgtgcaaattatctactatcctgcgaagttgaccccaattacatgccaagatgtttcgcgccactccattgcgccgctttcggtaattccgtgcaagtagctaatttgctaatcagccgcggtgcgtcagtccacgctgcggttaaatacgtcaattgtgaaggaggtttgctacactgtgcggtcagagccaactcggtagaatgtttgaagctgtttatatcgcatggtgtcgatgtgaatcaaattgaatcgggtggtaccaatgctatacacctagctgctgatttgggaatgattcaatgtttgacaatacttctggagacgcccggtgctgaccctaatgtgcgaacgagagtcggagatagagaatcgacggcgttacatttggcggctgatggtggttttatagaatgcgtggatttacttctcacaaaaggcgctgatgccagtttaaaaaaccaccgcggtttcacggctttacatttggctgcccgatcggcaagtttagaatgtgtggaatctttgctaagaaaagggaatgccaaccctaactctatggattttgatatgagaactccgcttcatgctgctattggaaaatctgacagtgcgtgcgatattatagaaactttgatcagttggggagcgaatgtaaatcaaaaggatgaatatggctttacaccgctgcacttggctgcacttgacgggctatctgcgtgcgtcgagacattaatctatcacggcgctgacgtaaccacgaggtctaagaaaggaaattctgcacttaatgtaatcgctcgaaagacacctgcatctcttgcgatgataacgcggaagttggactgcgccatcacactccaccattcccaaagcagcaatagagaagtcgagttggaactagacttcagaagcattctacaacattgctatcctcgagaaataagttatctcaacacgtttgtggatgaagggcaaaaagaggtacttctgcatccattatgttcagcgtttctttacataaaatgggagaagatacgtaaatattacgtggccagattattcttgagtttcatattcgttctttgtctcacactgtacgttttgacagccctcgcgcacaattgttataatggaagcaaggatatggaagagacgatacaggagcaagaactatgccaaaagcaatctattctaggagatttgttgagaaaaaatccgtttgttattgaaatgcaatggtgggtgttagccggcatcacgatatttgagatcttcaggaaagtttacggcatcgccggttactctacagtcaaacaatatctgatgcaatgtgagaacattatcgaatggttcgtcattgtgagcgtgttcctcatttcctacatttacacaaacataacgtacacttggcagaaccacgtgggagcgttcgctgtgctggctggttggacaaacttgatgatgatgattggccaactcccggtcttcggcacctacgtggctatgtatcaaaaagtgcaaaaggaattcgcaaagttactaatggcctactcttgcatattaatcggtttcacaataagtttctgcgtcatatttcctgattcgtcatcgttcgcaaatccattcatgggttttataactgtattgacaatgatgattggagagttgaacttggatttgctattgaatgagccggatggcaacgatccgccggtgctattggaattctccgcgcagataacgtacgtgctattcttgatgttcgtcaccgtcgtgctcatgaacctgctggtcggcatcgctgtccatgacattcaaggcctaagaaagaccgcaggcttgtccaagttagttcgacagactaaattgatttcgtacatggaaatggctttgttcaatggatatttaccgaaatgtctcttgaaaatactgcactcatcggctctcgtttcaccccaagcgtacagagtagtattgagtgtgaaacctttgaatccgagcgagaaacggctgccgagagatataatgatggcggcatacgacatagcgaagatgaggaaacagtacgggcacacgatatcgtcgagcggctcaacaacgggggcgtactcttgttttaaaaagtatgagaacaataacgactccagctaccgggagtacggctattcgtctgggctgggcagtttgcaagtgagattggacgagacgtctgaaaacgtgcgccagttgactcaggaagtgagggaattaaagaagctaataagcgcccagcagctcgtgatccaacaagccctggccggcgcgatggacaaccgttga

SEQ ID NO: 47 - DNA, 3365 bp, Helicoverpa armigera
  wtrw-Harm
cataatagcggcgttcggcgctcagtgccgcgtcgccgcccgcatgcccgccacgcgccgcctgctgaccgcgcgctggttcgcgcgccgccgacagcccgacgaagatgacgcccgccccaggaccctcccgcgctccgacatggaccgcagacctcgcgtctcccgcgtcctctcctcccccgccagaacgcagcaccagacgcatcccccgctcgacgaagagtccctcgaacgagcctacccctccatgggacacctcgagtacgtcaacgccggctcctcgccccccgccgagagcgcccctaacatgtacgacagcttcgaagagcctcccctcgacctaactgcgcacatctgcgaggactcgttacgtcagagcgcgcacgagcagatgcgcggcttcggcggacgtctgcgattactggacgaactagagaccggggtcattaccgcagaatccgctgccaccactttctcgacggcatcggaggctgagaagaacatatgtctgttctgggcggcattcctgaaactcaccaactacctacagcctctgatagaggtcggagccgacccactatactttgatgccttgggcctgtcccctcttcacgttgcagctttcagcggctccacggaatgcgccaattatctgctgtcatgcggctcagaccctaattacatgccgagatgcttcgccccgctccattgtgccgcattcgggaactcagtgcaagtggctaatttgctaatcagtcgcggtgcatccgtacattgcgcagtgaaatatgtcaactgtgaaggtggcctgctccattgtgcagtgcgagctaactccgtggaatgcctcaaattgtttatatcccacggtgtcgacgtgaatcaaattgaaccgggcggcaccaatgctatacatctcgctgccgatttaggaatgttccagtgtttgagtatactgctcgagacgcccggagcggaccctaacgtgcggacgcgcgtcggcgacagggagtccactgccttgcatctggcggctgacggaggattcgttgaatgtgtagatttattgctgtcaaagggggccgaggccagtctaaagaatcacagaggtttcactgcattgcatctggcggcgcgctcatcgagcttggagtgtgtggaatcattgctaagaaaaggaaacgctgaaccgaacgctaacgacttcgacatgaggaccccattacacgccgctatcggcaagtccgacagcgcttgcgatataatagaaactttgataagctggggagcgaatgtgaaccaaaaagatgagtatggcttcacgccgctgcaccttgccgccctcgacggcctgtctgcgtgcgtagagacattaatctaccacggtgctgacgtcacgacaaggtctaaaaaaggaaactcggcgcttaatgtaatagctagaaaaacgccggcgtctctggcgatggtaactcgaaaattggactgtgcgatcactctgcgacactcacagacgagcaacagggaggttgaattggagctagactttcgtagcatacttcatcattgttatccgcgtgagattagttatttgaatacgtttgtcgacgaagggcaaaaagaggttctcctacatccactctgttcagcatttctatacataaagtgggaaaaaatacgtaaatattacgtagctcgtttgtttctaagcttcatatttgtattgtgcctaacattgtacgtgttaactgctctggcgcataattgttataacggtagtaaagatatggaagaaacaatacaagagcaagaactttgtcagaaacagtccattcttggcgatttgttacggaaaaatccatttgtaattgaaatgcaatggtgggtgctagccggaatcacgatatttgagatattcagaaaagtttacggaatagccggctactccactgtgaaacaatatttgatgcaatcggagaatattatcgaatggttcgtgattgtgagcgtgtttctcatatcgtatatctacaccaacatcacgtacacctggcagaatcacgtaggcgcgttcgcggtgctcgccggctggactaacttaatgatgatgatcggacagctaccagttttcgggacttatgtggcaatgtaccaaaaagttcaaaaggaatttgccaaattactaatggcctactcctgtatcttaatcggttttactataagtttctgtgtaatatttcctgactcatcttctttcgcaaaccctttcatgggctttataacggtcttgaccatgatgattggcgaactgaatctcgatttgctgcttaacgagccggatgggaacgatccccctgtcctgttggagttctcagcgcaaatcacttacgtgctgtttctaatgttcgtgacagtagtacttatgaacctgttagtaggtatagctgtccatgacatacagggcttgaggaaaacggcagggctttcaaaacttgtcaggcaaacaaagttaatatcttacatggaactggccctattcaatggctatctaccgaaatgtttgttaaaaatccttcattcctcagcgttagtatcgccgcaagcttacagagtcgttttgagcgtcaaaccattaaacccgagcgagaagcgactgccgcgagacataatgatggctgcttacgacatcgcgaaaatgaggaagcaatacggtcacacgatatcctcgagcggctcgacgacgggcgcgtattcctgcttcaagaaatacgagaacaacaatgactcagggtacagagagtacggctactcctcagggctgggcagcctgcaggcgaggctggacgagacgtcagaaaacgtgcgccagttgactcaggaagtaagggaattaaagaaactgataaacgcacagcagcttgtgttacagcaggcgttgtccggcgcgatggaccgttgatgatataatggctgccgtttactttcaatgccactgtacacaagtcaataaactacagtgtgtttgtaccacatagctcggtgtactggctgacttaaattattattgagtggtgatatattttatttcgtttgttttacctagataatccactgttacaccgtcatacattttaattagggtagatggtagttgtaataatattgagagtttttgttgttattttcggtgtaattacggtagagtagggagtcgagggcttcgttcaagaacagtagtgttgtttcgcaaaaaaaaactaaatttaagggctggtcccaaattatttactaagttttaaatagggtaaatacgccaaatgtcggcctccccccaaacttcggccgtctgtacattttcagct

SEQ ID NO: 48 - DNA, 3501 bp, Spodoptera littoralis
  wtrw-Slit
gccgcccgcatgcccgccacgcgccgcctgctcaccgcgcgctggttcgcgcgccgccgacagcctgacgaagatgacgcccgtcccaggactctcccgcgctccgacatggaccggagacctcgagtctctcgcgtcctctcctcccctgctcgaacacaacatcagacgcaccctccgattgacgaagagtctctcgaacgagcctacccctccatgggccacctggagtacgtcaacgctggctcctcgcctcccgccgagagcgctccgaacatgtacgacagcttcgaagaacctcccctcgacctaactgcgcacatttgcggagactcgttacgtcagagcgcgcacgagcagatgcgcgccgtcggcggacgtctgcgattactggacgagctagagaccggggtcattaccgcagattccgctgcaactactttctcgacagcaaccgaagctgagaagaatgtatgcctattttgggcggccttcttgaaacttgccaacctactacagcccctgattgaggttggagccgacccattatactttgatgccttaggactgtccccgcttcatgtagcggccttcagtggatcgacggaatgcgctaactacctgctatcctgtggctcggaccctaattacatgccgagatgctttgctccactccattgtgccgcgttcgggaactcagtgcaagtggctaatttgctaatcagccgcggtgcatccgtacattgcgctgtgaagtacgtcaactgtgaaggaggcttgctccattgtgccgtgcgagctaactccgtggaatgccttaaattgtttatatcccacggtgtcgacgtgaatcaaatcgagccgggcggcactaacgctatacatctagccgctgatttaggaatgttccagtgtctaacaatactgctcgagacgcccggcgcagaccccaacgtgcgcacgcgcgttggtgacagagagtcgacggctttacatctggcagcggacggcggctttgtggattgtgtggatttgttgttatctaaaggggctgatgccagtttaaagaatcacagaggttttactgcactccatctagctgctcgatcgtcgagtttggagtgcgtagagtccttacttagaaaagggaacgcagaaccgaacgccaacgacttcgacatgaggaccccattacacgccgctataggcaagtctgatagcgcttgcgatattatcgaaactttgataagttggggagctaatgtaaatcagaaagatgaatacggcttcacgccactgcacctggctgctctcgacgggctgtcagcgtgcgtggagacactaatctaccacggtgctgacgtcacgacacgatctaaaaaaggaaactcggcgcttaatgtaatagctcgaaaaacgccggcgtctctagcaatggtaactagaaaattagactgtgcgatcacactgcgtcactcacagacgagcaatagagaagtcgaactagagctagactttcgtagcatacttcatcactgctacccacgggagattagttatttaaatactttcgtcgatgaagggcaaaaagaggttcttctacatccactatgttcggcattcttatacataaaatgggagaaaatacgtaaatattatgtagctcgcctgtttcttagtttcatatttgttctatgtctaacactatacgtgctgactgctttggcccataattgttacaacggcagtaaagatatggaggaaacgattcaagaacaagaactgtgtcaaaagcaatcaattctcggagacctactaaggaaaaatccattcgtaatagaaatgcagtggtgggtgctagccggtatcacgatatttgagatattcaggaaagtttacggtatcgccggatattctactgtgaaacaatatttgatgcaatctgagaatattattgaatggttcgtgattgtgagcgtgtttctcatatcctatatctacactaacatcacatacacctggcagaaccatgttggagcattcgcagtactcgctggctggacaaacttaatgatgatgataggacaactgcctgtgttcggaacctacgtcgccatgtaccaaaaagttcaaaaggaatttgctaagttattgatggcctactcctgtatattaatcggttttactataagtttttgtgttatattccccgattcttcatctttcgcgaaccctttcatgggttttataacagtcttgacgatgatgattggcgaactcaatttagatttattgcttaacgagccagatggtaacgatccgcctgtcctcttggaattctcagcgcaaatcacttatgtattatttttaatgtttgtaactgtagttcttatgaacttgctagtaggtatagctgttcacgatattcaaggattaaggaagactgctggtctctctaagttggtcagacagacaaagttgatatcctacatggagctggcgttatttaacggttacctgccgaaatgtctgttaaaaattctacactcgtcggctctagtatctccacaggcctatcgagtggtgctgagtgtgaaaccattgaacccgagcgagaagcgtttgccacgggatataatgatggctgcctacgaaatagcgaaaatgaggaaacaatatggtcacacgatatcatcgagcgggtcgacgacaggtgcatactcctgcttcaagaagtacgagaacaacaatgactcgggctacagagagtacgggtactcctcaggactgggcagcctccaggccaggttggatgaaacatcggagaacgtgcgtcagttgactcaggaagtgagagaattaaagaaactgataaacgctcaacagcttgtgttacagcaagcgttgtccggcgcgatggacctttgatgatataatggcagccgtttactttcaatgccactgtacacaagtcaataaactacagtgcgtattgtacagctcgctatgactgtctgacttaaattcttattgagtggtgatatttttattcttttaaattgtttttttcatagtaagcccattaggtacataggtattacaccgtcattcattttaattagttctagtaatataactatgataatattatgaggttttgttgttattttcggtgtaattattatttagaaataggggttggagtcgaagactctgttcattacacagttgtgttgtgccggaattgattaggtaggtatctacatttaagggctggtcccaaactaagattagctgttctatttgtaaagaggttaggcctaactattaggtaagagatattgatgtaatgtacctatttattaaactgtagatggatggagtctagctggggtattttattattgtttgacgttgaaagcactggacactgtgattgtaggtaatttatattatgctataatagattctattgtgatattattcgtgtcaataaaatta

SEQ ID NO: 49 - DNA, 3249 bp, Papilio Xuthus
  wtrw-Pxut
cagtgaagcgtcgaccgcctgtccgcatgcccacagcgcgcagcctgctctcgcggcgctggctccgcacccgccgcgccccgcatgcctcggagcccgagccagaccccggaaccatggagcgtcgccagcgcgttgcccgcgccctctcctccccggcgcgcgcgcagcaaccgcccgcggatgaggagtccctcgagcgcgccttcccctctaccggccacctcgaatacgtgctggccggctcctcgccgcccgccgagagcgcccccaacatgtacgacagctttgaggagcctcccctggacttaactgcgcacatatgtggcgactcgttgcgtcagagcgcacacgagcagatgcgcgccgtcggcggccgactgcgcctgctggacgacctggagtcgggcgtcatcacgccagaaaccgccctcgacacctttaccaatgccactgaagccgaaagaaatgtttgtctgttctgggcggcgttcctcaagcaagaccagttgctgccggcgttaatggagacgggagcggacccgctgtacttcgacgctctaggactatcctcgcttcacgcagcggcgttcagcgggtcctcagagtgcgccaactatctgctatcgtgcggggctgatcccaattacatgccccgttgcttcgcaccgctccattgtgccgcgttcgggaattcagtgcaagtggctaatttactaatcagtcgcggggcgtccgtccacgcggccgtcaaatacgtcaattgtgaaggaggcttgttgcactgcgccgtgcgcgccaactccctcgagtgccttaagctctttatttctcacggaatagacgtcaatttaatagaaccgggaggcacgaacgcgattcatctcgccgcagacctgggcatgattcaatgtctcgtaatactcttggacactcccggggctgaccctaacgtccggacgagagtcggcgacagagaatcgacggcgttacatttagcggccgacggcggtttcgccgattgtgttgacttgctcctttctaaaggtgctgatgcgagtttaaaaaatcatcgcggcttcaccgctctgcatttggccgcgcgctccgcgagcttggagtgtgtcgagtcattgttgcgaaaaggtaacgccgagcccaacgctatggacttcgacatgagatcgcccctccatgccgccataggcaagtccgacagtgcctgtgatattattgaaactttaataagttggggggcaaatgtcaaccagaaagatgaatacggcttcacgcctctccatctggccgctctagatggcctttccgcgtgtgtcgaaactttaatttaccacggcgccgacgtcacgacgaggtcgaaaaagggtaattctgcgctcaatgtaatcgctcgcaagaccccagcctcgctggctatggtaacgaggaaactagattgtgctatcacgttgcatcattcacagacaagcaacagagaagtagagttggagctcgactttcgcagtatactacagcactgctacccgcgagagataagctatcttaacacttttgtagatgagggacagaaggaggtgctgctacatcctttgtgctcggctttcctttacattaaatgggagaagattcgcaaatactacgtggcgcggttgttcctgagctttatatttgtcctgtgtctcactttatacgtcttgaccgccttggctcacaactgctacaacggcagcaaagatatggaagagacgattcaagaacaagagctttgtcagaagcaatcgattcttggggacttattaaggaaaaatccattcgtaatcgaaatgcaatggtgggtgctagcgggtataaccattttcgagatatttagaaaggtttacggcatagctggctactctactgtcaaacaatacctgatgcagtccgaaaacataattgaatggttcgtcatcgtgagtgtatttctcatttcgtatatttataccaacataacttacacgtggcagaatcacgtcggtgcgtttgcggtgctcgcaggctggacgaacctcatgatgatgatcggtcaactgccagtgttcggtacttacgtggcgatgtatcaaaaagtccaaaaagaatttgcaaaacttctgatggcctactcttgtatattgatcggatttacaatcagtttctgcgtcatatttccggattcttcgtcatttgctaatccatttatgggctttattaccgtactaactatgatgattggagaattaaacttagatttactgcttaacgaacctgacggtaacgatccacctgtattactggaattttcggctcagattacatacgtgttgtttctgatgtttgtgacggtcgttctgatgaatctgctggtcggtatagctgtacacgatatccaagggctaaggaaaaccgccggattgtccaagctcgtgcggcaaacgaaactaatatcttacatggaattggcattattcaatggatacttaccgaaatgtcttctaaaaattttacattcatcagcattagtttccccgcaagcttacagagtagtgttgagtgtaaaaccactgaatcccagcgagaaaagattaccaagggatataatgatggccgcttacgatatagcaaaaatgaggaaacagtacggacatacaatatcttcgaatggatctactacaggaacatattcttgctttaaaaagtatgagaataataacgactcgagttacagggagtacggatactccggcttaggcagcctacaggcgaggctggatgagacctcggagaacgtgcgacagctgacgcaggaggtgagagagctgaagaagttgattagcgcccagcagctagtcatccagcaggcgctggcgggcgcagcgcgggaaggcgcgggacgaccgttgatcacgtaatgcccaggaccgtttagtttcaatgccagcggcgcatgagtcaataaactatagcgacgggcggcgggcgagcgctgtaataatctttcgttacgtgctaccgtgggcggatgagaacttaaaatattttgaagtgttgtctattttttattattgtatataaatttagggtgtcgttttaaaatttagatttatttcattaaagtcgtagaaaaacatatcatctggtgataaaaattacatcattcaaacggttcgaacgatagttgccttcgtggtttgactgtgattgtatatgata

SEQ ID NO: 50 - DNA, 3010 bp, Papilio machaon
  wtrw-Pmac
ggacccgggaccatggagcgccgccagcgcgtcgcccgcgccctctcctccccggcgcgcgcgcagcagccgcccgcagatgaagagtccctcgaacgcgcctttccctccaccggccacctcgagtacgttctggccggctcctcaccgcccgccgagagcgcccccaacatgtacgatagcttcgaggagcctcccctggacctaactgcgcacatatgcggcgactcgttgcgtcagagcgcacatgagcagatgcgcgccgttggcggccgattgcgactgctagatgagctcgagtcgggcgtcatcacaccggaaaccgcccttgacaccttcaccaatgccactgaagccgaaagaaacgtttgtctgttctgggcggcgttcctcaagcaggaccagctgctgccggcgctaatggagacgggagcggatccgctatacttcgacgctctggggctctcctccctacacgcggcggcgttcagcgggtcttcagagtgcgccaactatctgctatcgtgcggggctgatcccaattacatgccccgctgcttcgcaccgctccattgtgccgcgttcgggaattcagtgcaagtggctaatttactaatcagtcgcggggcgtccgtccacgcggccgtcaagtacgtcaattgtgaaggaggtttgctgcactgcgccgtgcgcgccaactccgtcgagtgcctcaagctctttatttcgcacggaatagacgtcaatttaatagagcctggcggcacgaacgcgattcatctcgccgcggacctgggcatgatacaatgtcttgtcatactcttggacactcccggggccgaccctaatgtccggaccagagtcggagatagagaatcaacggcgttacatttagcggccgacggcgggttcgcagattgtgtcgacttacttctttctaaaggtgccgatgcgagtttaaaaaatcatcgtggcttcacggctctgcatttggccgcgcgctcagcgagcttggagtgtgttgagtcattgttgcgaaaaggtaacgctgagcctaacgctatggacttcgacaagagatcgcctctccatgccgctataggcaagtccgacagtgcatgtgatattattgaaactctaataagttggggagcgaatgtcaaccagaaagatgagtacggtttcacacctctacatctggccgctctagacggcctatctgcgtgtgtcgaaactttaatttaccacggtgccgacgttacgacgagatcgaaaaagggtaattctgcactcaatgtaattgcccgcaagaccccagcctcgctagctatggtaacaaggaaactagattgcgctatcacgttgcatcattcacagacaagcaatagagaagtagagttggaactcgactttcgcagcatactccagcattgctacccccgagaaataagctaccttaacacctttgtagatgagggacagaaggaggtgctgctccatccattgtgctcggcattcctttacattaaatgggagaagattcgcaagtactacgtggcgcggctgttcctgagtttcatatttgtcttgtgtctcactttatacgtcttgactgcgttggctcacaactgctacaacggcagcaaagatatggaagagactattcaagaacaagagctttgtcaaaagcaatcgattcttggggacttgttgaggaaaaacccgttcgtaatcgaaatgcaatggtgggtgctagcgggaataaccattttcgagatattcagaaaggtttacggcatagctggctattccaccgtcaaacaatacctgatgcagtctgagaacataatagaatggttcgtcatcgtgagcgtatttctcatttcgtatatttataccaacattacttacacgtggcaaaatcacgtcggtgcgtttgcggtgctcgccgggtggaccaaccttatgatgatgatcggccaactgccagtgttcggtacttacgtggccatgtaccaaaaagtccaaaaagaatttgccaaacttttgatggcctactcttgtatattgatcggatttacaatcagtttttgcgtcatatttccggattcctcgtcatttgctaatccatttatgggctttattaccgttctaactatgatgattggagaattaaacctagatttactgcttaacgaacctgatggtaatgatccacctgtattattggaattttcggctcaaattacatacgtgttatttcttatgtttgtgacggttgttttgatgaatctgctggtcggtatagctgtacacgatatacaaggactgaggaaaaccgccggattgtccaagctcgtgcggcaaacgaaactaatatcatatatggaattggcattattcaacggatacttaccgaaatgtcttctaaaaattttacattcatcagcattagtttccccgcaagcttacagagtagtcctgagtgtaaaacctttaaatccgagcgagaaaagattacccagagatataatgatggcagcttacgatatagcaaaaatgaggaagcagtacggtcatacaatatcttcaaatgggtctactacagggacatattcttgctttaaaaagtatgagaataataacgactcgagttacagggagtacggatactctggcttaggcagcctgcaagcgaggctggatgagacctcggagaatgtgcggcagctgacgcaggaggtgagggagctgaagaagttgattagcgctcagcagctggtcatccagcaggcgctggcgggcacagcgcgggacggtgcgggacggccgttgatcacgtaatgctcaggaccgtttagtttcaatgccagcggcgcatgagtcaataaactatagcgacaagcggcgggcaagcggtgtaataatctctcgttacgtggtaccgtgggcggatgagaacttaaaattttttgaagtgttgtttattttatttttattattgtatata

SEQ ID NO: 51 - DNA, 3207 bp, Vanessa tameamea
  wtrw-Vtam
aatagcaggcaagcagccagtcccgcgcagaccgcccgcatgcccacaacgcgtagcctcctctcttcgcgctggttccgctcacgccgcgccccgcggttagacgagcctgatgacaccaccggaaaccaaccccagaacatggaccgaaggccgcgtgtcgcacgtgttctcagctcccctgcacgtgcgcagactgcgccactcgatgaggaatccctcgaaagggcctttccatccatgggtcaccttgaatatgttctcgctggatcttcaccaccggccgaaagcgcccctaatatgtacgatagcttcgaggaacccccactggacctaactgcgcacatatgcgctgattcactacgtcagagtgcttacgaacaaatgcgagcagtcggcggacgactaagactgctcgacgaattggaatccggcgtcataacaatagacaccgctgttaacacatttacaacagcatctgaagccgagagaaatgtatgtttattttgggtcgcctatctcaagtatgaccattttttacaaccgttggtcgaagctggcgctgacccgttatatttcgacgcgctcggtctgtctccattacacgcggccgcatttagtggttcgacggagtgcgccaattatttattgtcttgtggagcggatcctaattacatgccgagatgctttgtaccgcttcattgtgctgcgttcgggaattctgtacaagtggctaatttactgattaatcgtggtgcctcagtccacgcggctgtaaaatatatcaactgtgaaggaggcttattgcattgtgctgttcgagctaattctgttgactgtctgaaactatttatatcacatggagtagacgtaaatcaaatagaaccaggcggtactaatgcaattcatctcgccgctgatctcgggatgattcagtgccttgcaatattgatagagacgcctggagccgatcctaacgtaagaacgagagtgggtgatcgggaatcaacggctctccatttagcagctgacggtggcttcgttgaatgtgttgatttactactaaacaaaggtgcagacgccagcttaaagaatcatcgagggtttaccgccttacatcttgccgcacgctcttcatgtctggaatgcgtggaatcattgcttaggaaaggaaacgccgagcctaattcaatggattttgataaaagaactccactgcacgccgccatagggaagtctgatagtgcctgtgacataattgaaaccttaataagttggggagcaaatgtcaatcaaaaggacgagtatggtttcacacccctgcacttagctgcacttgatggtctctctgcttgcgtggagacattaatttatcacggcgctgatgtaacaacgcgatctaaaaaaggtaactcagcacttaatgtaatcgccagaaagacacctgcgtcacttgcgatgataacaaggaagttggactgtgctatcacattacaccactcacaaaccagtaaccgagaggttgaacttgaactcgacttccgtagcatactgcagcattgttaccctcgagaaataagttatcttaatacatttgtggatgaaggccagaaggaagtacttctacaccctctttgctcggccttcctatatataaaatgggagaaaattcgtaaatattatgtcgcccggctatttttaagcttcatattcgttctttgtttaactttgtatgtattaactgcactcgcgcataattgctataatggaagcaaagacatggaagaaacaatacaagaacaagaactgtgtcaaaaacaatccatacttggagatttacttagaaaaaatccgttcgtaatagaaatgcaatggtgggtgctagcaggcataacaattttcgaaatattcaggaaagtttacggcatcgcgggctattcgacagttaaacagtatttaatgcaatcagaaaatattattgagtggtttgttatcgtaagtgtgttcttaatatcatatatttatacaaatataacgtacacgtggcaaaatcacgtgggggcttttgcagttctcgcgggatggacgaatttaatgatgatgatcggtcagttgccagtttttggaacttacgttgcaatgtatcagaaagtacaaaaagaattcgcgaaactattgatggcatactcatgtattcttatcggattcacaataagtttctgcgtgatatttcctgattcgtcatcgttcgcaaatccttttatgggttttataacagtcttgacaatgatgatcggcgaactaaatttggatttgttattaaacgagccagacggcaatgatccgccggtcttgttggaattttctgcacaaataacatacgttcttttcctcatgttcgtcaccgttgtgcttatgaatttgctcgtgggcattgcagttcacgatatacagggattgagaaaaactgctggcctttcaaaactcgtgagacaaaccaaactaatatcctatatggaactggcgctgtttaatggttacttgccaaaatgtctcctaaagatattacattcgtcggcccttgtatcaccgcaagcttatagagtagttttgagtgtgaaaccgttaaatcccagtgagaaacgactcccaagagatataatgatggcagcatatgacattgcaaaaatgagaaaacaatatggtcacacaatatcatcaaatggttcgactacaggggcgtattcgtgcttcaaaaaatacgagaataacaatgattctggctaccgggagtatggttattcgtcaggcttaggaagtcttcaggccaggttggatgaaacgtcagaaaatgttcgacagttgacacaggaggtgaaagagttaaaaaagcttatcagtgcacagcagcttgtaatacaacaagccctgtcagtcgcaatagacaaccgttgatgatataataggccgtttatatttcaatgccagcggtacaagtcaataaactatgaggaacggttattatatatttacgtttagatttgtggacggttaagaacttaaattgtaaacgattttttgtattcgcatttgaatgttgtcgagtaaattatgtttaaaacgatgagctgtgatcgaaaatgagatagtgcgtaagggttttgtgatataatttatcatgataataaatttatttttcataagcct

SEQ ID NO: 52 - DNA, 3039 bp, Bombyx mori
  wtrw-Bmor
gaccacgagtccctcgagcgcgcctacccctccatggggcacctcgagtacgtgctggccggctcctcgccgccggccgagagcgcgcccaatatgtacgacagcttcgaggagccacctctggacctgaccgcgcacatctgtgccgactcgctgcgtcagagcgcccacgagcaaatgcgagccgtcggcgggcggttgcgcctccttgatgagctcgagagtggagtcattccagctgacgcgacgactgacgccttcgcgaccgccaccgacgccgaaaagaacgtctgcttattttggaccgcgtttttgaaactcgccaacttgctaccaccgctgattgaggttggggcggaccccctgtactacgactctctgggcctgtctccgctgcacgtggccgcgttcagtggttccgtagaatgcgccagttatctgctgtcgtgcggcgcggaccctaattatatgccccggtgttttgcgccgcttcactgtgccgcattcggtaactcggtacaagtggctaatttgctaatagctcgcggtgcgtccgtgcacgcggctgtaaagtacatcaattgcgaaggaggtctccttcactgtgcggtgcgagctaattccgcggagtgcctcaaattgtttatatcgcacggagttgacgtgaacttgatcgagccgggcggtactaatgccattcacctcgccgctgatttgggcgtgaaacagtgtcttataatattgcttgacacgcccggagccgaccctaatgttagaacaagagtaggggacagagaatccaccgctttgcatttagccgccgacggtggctttgtcgagtgtgtcgatttgttactcagcaaaggtgccgatgcgagtttgaagaatcatagagggttcacagcgctacatttggcagctcggtctgcgagtttagaatgcgtggaatccttgctccggaaaggcaatgccgaccccaacgctatggattttgataaacgaacaccgctacacgcagctattggaaaatcggattccgcttgtgatatcatcgaaaccttaatcagttggggcgccaacgtaaaccaaaaagatgaatacggatttactccactgcacctagccgcacttgacggactgtcggcctgcgtggagaccttgatatatcacggtgctgacgtcacaacgagatctaagaagggaaactcggctcttaatgtaatcgctagaaaaacgcccgcttcactcgcgatggtaactagaaaattggactgcgccattactctacatcactcgcagtcgagcaatagagaagttgaattggagcttgattttcgtagcatattgcagcattgttatccacgagagatcagctatttgaatacgttcgtcgacgaaggccaaaaagaagtcctacttcacccactatgctctgcctttctgtacattaaatgggagaaaatacgtaaatattatgtggcaaggttatttttgagttttatttttgttttatgcctcacattgtatgtattaacagcactcgcgcacaattgttatgacggtagcaaggatatggaggagacaatacaagagcaggagttgtgtcagaagcaatccatccttggtgacctattaaggaaaaatccattcgtaattgaaatgcaatggtgggttctagccgggataacgatatttgagatatttaggaaggtatacgggatcgctggatattcgaccgtcaaacagtatttgatgcaatcggagaacattattgagtggttcgtgatcattagtgttttccttatttcgtatatatacacaaacatcacgtatacatggcagaaccacgtcggcgccttcgcggtgctcgctgggtggacgaacctcatgatgatgatcggacagctacccgttttcggtacgtacgtcgcgatgtaccaaaaagtacaaaaggaatttgccaaattgcttatggcctattcgtgtatcctaatcggtttcacgataagtttctgcgttatcttcccggactcgtcctcgttcgcgaatccgtttatgggcttcataaccgtcctgacaatgatgatcggggagctaaatttagatttactactcaacgagccagatggaaacgaccctcctgtcttgctcgagttttctgcgcagataacctacgtgttattcctgatgtttgttacggtcgtactgatgaatttactggttggtatagcggtccacgatattcagggtttgaggaaaaccgccggcctttcaaagctggttcgacaaaccaaactgatatcttacatggaattggcgttgtttaatggatatttaccgaaatgcttactaaagatactacattcttcagctttggtttcgccccaggcctacagggttgtgctaagcgtcaaaccgttgaacccaagcgagaagagactgcctagggacataatgatggccgcttacgacatagcaaagatgcggaagcaatacgggcacaccatatcatcgagcggttcgacaacaggcgcctattcatgcttcaaaaagtacgagagcaataacgactccgggtaccgagaatacggttactcaggactcggaagcatccacgccagactcgacgagacatcggaacacgtcagacaattgacacaggaagtcaaggaattgaagaagctaataaacgcgcagcaacttgtcattcagcaagcgctggtcggcgcgatggaccgtccgtgacataattgcctgtcattccgtttcaatgccagtatacaagtcaacaaactgtattgtagactcgcgctatctattcgttcgagtttcggacttaaataagaacggtgatattttttgcgtgttagtattttttatagatgtaattaactgtgatttgggtgtataataggttagaattaggtacattgtgatatgaatattcatggcgctaatgcgagtatttatatatgtgatttgcaaataaattttaccaaattaggaaaaaaaaaaaaaaaaaaaaaaaaaaaaaaaaaa

SEQ ID NO: 53 - DNA, 2991 bp, Anopheles gambiae
  wtrw-Agam_2
atgaatgagaatgggcctcgtaatgagaatagcaccaagactgctaacatacaaaataacataagcgatgtgactgctggaatcagacgctcatcagcagacaatcataacgtgtctgcagcaacagtaaatggaagctttaccaccaccacaaatactaacaccaaaacaactgcatcacatagtggaacaggtcaacctaacggtcgtaaatcgcacgttgactgttatgaatacatggaagtaggaccatcccctcctgccgagggcgcaccgaatctatacgatagctacgacgaaagttactccgaatccagtgcccaactctgtaatgacatcatccgtatatcgctcacagagcagatgcggcttgcaggtggtcgagtggcattgcttgaaacaacgaatacctcaactacaacctttcccactaacaacagtgtcagcgttggaggacaacagcttgaaaaaaatatctgctttctgtgggcggcatttctacgaaagtttcatctacttgatcagtgtgtccgactcggtgccgatatcaacttttgcgacagtaatggtttaacagcgctccatctcgcatctttcagtgggtgtactgaatgttgcgcatttctgattcagcatggactagacgttaatatgcaacctaaatggtacactccattacactgtgccgcattcggtaattcattagctaccgctgagcttctaattaaaaatggtgctcgcattgacgtgccaaccaacaagcaacactgtgaagaatcgttgctacactgtgccgtacgttcaaatgctatcgactgtcttcgattcttcatagcccacggttcaaatgtaaatgcactagaacgtaatggaacgaacccaatccatcttgccgccgacctcggccacacccagtgtcttgctgcattgctagagtgtccgaatgccgatcccaacatccgtattcagcaaggggataagcagatgactgcgttgcatcttgccgcagacgagggtaatttggactgcgttacccaactgctagcacgaggcgcggacgtccgcgctcgtaatcatcgtggttttacgccgctacatttggcagctcgcagtggaagtgcagattgtgtcgaggccctactaaaacttggtggatgtgatccgaatatggccgatttcgatcaacgtacgccactacacgctgcagtcagcaaatccgatactgccgtcgaaatgattgagacactaattgcatggggtgctaatgtcaaccagcgcgatgtgtacggatttaccgcactgcatcttgcggcattagatgcactaggtccttgcgtagaaacattgctttaccacggtgcggatgtcacaatgaaatccaggaagggaactagcgctctcaacattataagtcgtaaaactccggcatctctaggagtcatacaatgcaaacttgatgctgctatcactctgacacactcccaggattcatccagccgggaggtggaattagaactagattttcgcagtatcctgcaacattgccacccaagggaaattagctatctaaatacatttgtggacgatggacaaaaggaatttttgcaacatccgctctgctcagcttttctctacattaagtggaacaaaatacgcaaatactatatcgcgcgattgcttttctgtttcacatttgtgctctttctaacactgtacgtgctcacagcactagcgcataattgctataacggcagcaaggacatgaaggaaactattcaggaacaggagctttgtcaaaaacaatccatctttggagatatgctacgcaataacccattcgtaattgagatgcaatggatggttctagtggcaatcacagcaattgaaatttgtcgtaagatctatggcatcactggctatacttcgttaaaacattacgtaacacaaacagaaaatgcgatcgaatggttcatcatactgagcgtatttgttatctcttacatctacactaaaaggacctacacttggcagaatcatgtaggagcctttgcagtactgcttggttggacgaatctgatgcttatgataggtcagttacccgttttcggtgcgtatgtcgccatgtataccaaagtgcaggttgaatttgccaaacttttcatggcctattcatgtatgttgattggcttcacaatcagcttttgtgtcatctttccatcttcttcttcgtttgctaatcctttcatgggatttatcactgtactagtgatgatgacgggggaacaagaccttgaattgctgatcaatgatcctgatggcaaggatccaccgtttcttcttgaaattagcgctcagattacttttgtgctgtttttattgtttgtcacagtcattctgatgaacttgctcattggtatagctgtgcacgatatacaaggattgaaaaaaacggccggtctgtcaaaattagtccggcaaacgaaactgatttcctacatcgaatctgctctttttaatggttggctaccaaactggctgcgcaatttactttactacacggcgctggtctcgccacaagcttaccgtgttgtgttaagcgtcaaacctctcaatcccggcgaaacaagacttccccgggatatcatgatggccgcatatgaggtagcgaagcagaaaaaacactattcaaaaacgtacaaacgcacagatagtagctgtaatgtatccaactgtcgccgagctgctcacacaggaatgggagtagccagcacaaataatgatcatacaacaaagtttggatacgtctatgacacaccaacgctgtatggtctcaccaataagttagacgaacataatgactatattggtaacattgcaacagagattgcagaactacgatcaacaatcgaggagaatcagcagatgctgcggcaggtgctcgaattactaagcaaaagtcaaacacacaacattcaatcgaatcaattataa

SEQ ID NO: 54 - DNA, 3104 bp, Aedes aegypti
  wtrw-Aaeg
atttaatttagctgtgctcaagatgttcagtagagatgcgatcttcgcactgtaaagtgcgacagcgttgaacggaaggatggagaatttcggctacaaggaagggtcggccaaacccaaacgcagggttggaacccgatcgacaaagatcaaaacccaacaagttccgatagccatgaaaccaaggttttcactaactccggatgttactgttcattggcgaaacgatccagaaactgtactcgcggaagattttgaatacatgaagatcggcccatccccaccagcggaaaatgcaccgaatatgtttgataattatgaagaaactaatgctgaatttggctttgaagtgtcaagtgaaactattcgaacctcgttgatggagcaaatgcgactatcatcaggaagactgaaactattggataacatagatcagggcaacattatcgctgcgaatacgaaagaaatgtttgaaggcgctactaaggctgagagaaacattagttttctgtttgcggcatttcttaaacgatgggatttgttagagagcctactggaatgtggtgcagagttgatattctccgatagcaatggatttagcgcgttgcatttgagctcatttagtggatgtctgaattgcacaagttttctagtgtcgaaaggaattgagatcaacatgcagccaaaggcctttacgcctttgcattgtgcagcttttggtaattcggtagaagtggcgcgatatctaataacgaaaggtggaaaactgaatatcaatacgaagaaacaaaattgcgaagaatccttattgcactgtgcggtacggtcaaatgccatagattgtgtgaagttattcatttcggaagggatggatgttaactcgctgaaaccaagtggaatgaatgctatccacctcgctgcagatttaggctatgttgattgcttgaaagctctactagactttccgacggctgatccgaatatacggattggcatacgtgaaaaggaatctacagcgctacatttggccgccgacgaagggaacgtcgagtgtgtgaatttattactggccaaaggggctgacgcaaaattgaaaaatcaccgtggattcacacctttgcatcttgctgctagaacatccagtctggagtgcgttgaattgctgctaagaattggaagcgcagacccgaatgcagaggactttgatcaacgtacaccactccacgccgcaatcgggaagtcggatatggcgtttgatattatcgagactttgatttgctggggtgctgatgtgaatagcaaagacgtgtttggattcactcctttgcacttggcagcactggatggacttgctcattgcgtagaaattttaatctatcatgatgcggacgttacaaccaagtcaaagaagggaacgactgcattgaatgttatcacgagaaaaacacctgcgtcgttagctatgataagtaggaaattcgacgatgcaatgacgttgattcattctcaggatccatcagataatgaagtagtcctggagttagactttagaagcattctgcagcactgctatccacgagaaatcagctacttaaacacattagtagatgagggacagaaggaaattcttcaacatcctctatgttcagcttttctatacattaaatggggaaaaattcggaaatattacatagccagattgctgttctgcttcatattcatactgttccttaccctgtatgtattgacagccttggctcataactgttacaatggtagcaaagatatggaagaaactattcaagagcaggaactttgtcagaagcagtctattttagggaatatgttacgcaacaatccatttgtaatggaaatgcaatggatggtgctagtagctattacattcgtggaaatttgtcgaaaactctatggaatgaccggatattcatctattcgacgctacgtcacacaagtggagaatgtcacagaatggttcatcatagttagtgtttttgttatctcctatatctacacgaagcggacgtatacctggcaaaaccatattggagcctttgcggtattgctgggatggacccacttgatggttatgattggtcaattacctgtattcggtgcatacgtagcgatgtacacaaaagttcaggttgaatttgctaaactattcattgcctattcatgcatgctagtgggattcacaataagcttctgtgtgatatttccatcatcatcgtcctttgaaaacccattcatgggctttattacagtactagtcatgatgattggtgaagttgacctagaactactaatcaacgacccagatggaaaagaccctccgttcatgttggagttaagtgcccaaatcacatttgttctatttcttttattcgtcacggtgattctaatgaatcttttggttggcatagctgttgacgacattcaagctctgaagaaaaccgccactctctccaagctggtcggtcaaacaaagcttatctcctacattgagtcagcactgtttaacggatggcttccaaattggcttcgtagtctgctgcactatactgcccttgtttcgcctcaagcgtaccgtgtgattttgagtgtgaaaccactgaacccagaagaaaagcgcctcccaagaacgatcatgatggctgcgtatgaagtggcaaagtcaaagaaacagtcaggcgccacgactattagcaatccggctgcttacaaatatcgcttccagaacggtaacgttgtatccagtcagcaggccaactgtaaccaaccactggaacgcatcatagagtcagactatggtttcgaaaccgctagtttatgcacgctgaccacgaagatagatgaaagttcggaaaaattggacgaactttccaaagagctattggaattgaagacggtattgaaacacaatcaatgtttggttgacaaaatttccaaaattcttctgagataaattgatagataataaaacgatagggataatacaaataaatctcatatatgtatctaaatctaccaaaaatatgaaaactaataaaagcataatgcaaaataaagtatagcgcaaatta

SEQ ID NO: 55 - DNA, 2940 bp, Culex quinquefasciatus
  wtrw-Cqui
atggagaacttcggctacaaggagggttcgaccaaaccgaagcagcgccgcctcggatcatcgcggtccaccaagatcaagagtacgcaggtggcgccggcgccggtctccgcgaaacccagattctcgctgaccccggatgtgacggtgcactggcgcaatgatccggaggcggtgctggcggaggactttgagtacatgaagatcgggccgtctccgccggcggagagcgcgccgaacatgttcgagaactacgaggagtcggcggtggagtttggcttcgaggtttcggcggagacgatccggacgtcgctgatggagcaaatgcggatatcgtcgggccggttgaagctgctggacaacatcgagcagggcaacatttgtgcggccaatgtgcgggagatgttcgagggttcgagtaaggccgagaagaatataagttttttgttcgcggcgttcttgaagcgatgggacttgctggagggactgttggagtgcggggcggagttgatctactttgatagcaatgggttttcggcgttgcatttgagtgcgtttagtggttgtttgaactgtacgagcctgctggtgtcgagggggatcgacgtgaacatgcagccgcgggcgtttactccgttgcattgtgcggcgttcgggaacgcggtggagattgcgaggttcttgatcaacaaggacggcaagcagtgcatcaacacgaagaaacaaaactacgaagagtcgctgctgcactgcgcggtccggtcgaacgcgatcgactgcgtcaagttgttcatttcggagggaatggacgtgaactcgctgaagccgagtgggatgaactcgatccacctggcggcggatttggggtacgtggagtgcttgaaggtgctgctggattgtccgacggcggatccgaacatccgcatagggataagggaaaaggagtcaacggcgttgcatttagccgcggatgagggaaacgtggagtccgtgagtctcctgctggccaaaggagccaacgccaagttgaaaaatcatcgcgggttcaccccgcttcacctggccgcgcgaacctctagcttcgagtgcgtcgagctgctgctccgagtcggtaatgctgaccccaatgcggaagactttgatcaacgcaccccgttgcacgccgcgatcggcaagtccgagagtgcgttcgacatcatcgaaacgctgatctgctggggcgcggacgtcaacaagaaggacgtgttcgggttcacaccacttcatctagccgcgctggacggcctggcgcactgcgttgagatcttgatctaccacgacgcggatgttacgaccaagtcgaagaagggcacgaccgcgttgaacgtgatcacgcgcaagactccctcgtcgctggcgatgatcaaccggaagtttgacgacgcaatgacgctgatccactcgcaggatccgtcggacaaggaggtcgtgctggagctggatttcaggagcatcctgcagcacggatatccgcgcgagaccagctacctgaacacgctggtcgacgagggtcagaaggagatcctgcagcatccgctgtgttcggccttcctgtacatcaagtggggcaagatccggaagtactacatcgctcggctgttgttttgttttatttttattctgtttttaacactttacgtgctgaccgccctcgcccacaactgctacaacggtagcaaggacatggaggagaccatccaagagcaggaactctgtcagaagcagtcgatcctcgggaacatgctgcgcaataaccccttcgtcatggaaatgcagtggatggtgctggtcgcgatcaccttcgtcgaaatttgccgtaaactgtacggcatgaccggatattcctcgatccgacggtacataacccaaatggagaacgtcaccgagtggttcatcatcgtgagtgtgtttgtaatatcgtacatctacaccaagcgaacctacacctggcagaaccacatcggagcgttcgccgtcctactcggctggacgcacctcatggtcatgatcggtcaactcccggtgttcggagcgtacgtcgccatgtacaccaaagtccaggtcgagtttgccaaactcttcatcgcctattcctgcatgctcgtcggcttcaccatcagcttctgcgtgatcttcccctcgtcctcctccttcgagaaccccttcatgggcttcatcaccgtcctcgttatgatggtcggcgagctcgacctggaactcctcatcaacgacccggacggcaaggatccacccttcatgctggaactcagcgcccaaatcaccttcgtcctcttcctactcttcgtcaccgtcatcctcatgaacctcctcgtcggtatcgccgtcgacgacatccaggcgctcaagaaaaccgcaaccctctccaaactggtcggccaaaccaagctcatctcgtacatcgagtcggccctcttcaacgggtggctccccaactggctccgttccctcctccactacaccgccctcgtctcaccccaagcctaccgcgtcatcctctccgtcaaacccctcaacccggaggaaaagcgcctcccccgagccatcatgatggccgcctacgaagccgccaaaaagggcagcaaactccagcccggactcagcaaccccgtcgtcttcaaataccgcttccaaaacggaacccccggaaccgacccccaatcgatcggcggcgcccaaatcgaccccaacgcaccgcccctcgagaagatcgtcgagtccgactacgggttcgaaaccgccagcatctgcaccctcgccaccaagatcgacgaatctgccgaaaagctggacgaactcgccaaggaactggccgagctgaaagccgtcctcaagtacaaccaaagcgtcgtggacaaaatatgtaaaatactatcaaagtga

SEQ ID NO: 56 - DNA, 2940 bp, Anopheles gambiae
  wtrw-Agam1
atggagaacttcggctacaaggagggctcgtcgaagccgacgcggcgcctcacggccaaatcgatgaagcgccgcaactcgcagatcccgatcaagcccagattctccatctcgcccgagctgaacgtgcactggatgaacgaccaggaggcgatggtgacggaggactttgagtacatgaagattgggccgtcgccgccggccgaaagtgcgcccatcatcttcgacagctacgaggagtcgagcccggagttcggcatcgagctgtcgagcgactcgatccggacggcgctgatcgagcagctgcggctggcgtcgggccgggcccacctgctcgacagcatcgagcagggcaacatggtggcgtcgaacgtgggcgagttcttcgggggcgcgagcaagacggagaagaacatctgcttcctgtgggccgccttcgccaagcggtgggacctgctggacgcactgatggagcacggctccgagctggcgtaccacgacacgaacggcttcaccgcgctgcacctgagcgcgttcagcggctgcctcaactgtgcgagcgtgctggtcgcgaagggcatcgacgtgaacctgcagccgaaagcgtacacgccgctgcagtgcgctgcgttcggcaatgcggcgcacacggccctgctgctgctgagcaagggcgcccggctcgacctgtgcacgcggcgcccgggcggcgaggagacgctgctccactgtgcggtgcgcgcgaacgcgctcgactgcgtgcggctgttcatcgcggagggcatggacgtgaactcgatcaagccgagcggcatgaacgcgatccacctcgcggcggacctcgggcacgtggagtgtctgcgggtgctgctggcggcgcccggcgccgacccgaacatccgcatcggcatacgggagaaggagtcgaccgcgctgcacctggcggcggacgagggcaacgcggcctgcgtcgcgctgctgctcgagcagggtgcggaggcgcggctgaagaaccaccgcggcttcacgccgctgcacctggcgtcgcgcacctccagcctggagtgtgtggatctgctgctgcgcgccggcagtgccgacccgaacgaggaagactttgacatgcgcacgccgcttcacaccgcgatcgggcggtccgagtcggcgttccacatcatcgagacgctcatctgctggggcgcggacgtgaacaagaaggacgtgttcgggttcacgccgctccatctggccgcgctcgacgggctggcgcactgcgtcgagatactgctgttctacgacgcggacgtgacggccaagacgaagaagggcacgaccgcgctgaacgtgatcacgcgcaaaacgcccggctcgctcgcgatgattacgcagaagttcgacgacgcaatgacgctcatccactcgcagaacccgtcggagaaggaggtggagctcgagctggactttcgcacgatcctgcagcactgctatccgcgcgagatcagctacctgaacacgctggtggacgaggggcagaaggagatgctgcagcatccgctctgctccgcgttcatctacatcaagtggggcaagatccggaagtactacatcgcccggctgctgttctgcttcatcttcatcctctttctcacgctgtacgtgctgacggcgctcgcgcacaactgctacaacggcagcaaggacatggaggagacgatccaggagcaggagctgtgccagaagcagtcgatcctcgggaacatgctgcgccgcaacccgttcgtgatggagatgcagtggctggtgctggtcgcgatcacgttcgtcgagatctgccggaagctgtacggcatcaccggctactcgtcgatccgccggtacgtcacgcagatggaaaacatcaccgagtggttcatcatcgtgagcgtgttcgtcatctcgtacatctacacgaagcgcacgtacacgtggcagaaccacatcggcgcgtttgcggtgctgctcggctggacgcacctgatggtgatgatcgggcagctgccggtgttcggcgcgtacgtcgcgatgtacacgaaggtgcaggtggagttcgcgaagctgttcatcgcgtactcgtgcatgctggtcgggttcacgatcagcttctgcgtcatcttcccgtcgtcgtcgtcgttcgagaacccgttcatgggcttcatcaccgtgctggtgatgatggtgggcgagctcgacctcgagctgctgatcaacgatccggacggcaaggacccgccgttcatgctcgagctgagcgcgcagatcacgttcgtgctgtttctgctgttcgtgacggtgatactgatgaacctgctggtcgggatcgcggtcgacgacattcaggcgctgaagaagacggccaccctgtcgaagctggtcggccagaccaagctgatctcgtacatcgagtcggccctgttcaacggctggctgccgaactggctgcgcagcctgctgcactacacggcgctcgtgtcgccgcgcgcctaccgcgtcatactgagcgtgaagccgctcaacccggaggagaagcggctgccccgcaacatcatgatggcggcgtacgagatcgcgaaggagaaggagcagcagctggcggcggtcggggagcccacggcggtgccaccgggggccaccgggggcgaaccgggggcggcacagtccctccccggcagtggcgccgagtcgcccgtctcacccaacgcaccggacggcggtgttggtggtggtggtggtggtgagggggcgcgtgccaccgacacgctggacgcgctcgccaccaagatcgaccagagcgcggagcggatgagcgatgtgacgcgcgagctgcaggagctgcgggcggtgctgaagcagaaccagcagctgatcgacgagattgcgcggcaagtgtgcggcagggagtag

SEQ ID NO: 57 - DNA, 3280 bp, Lucilia cuprina
  wtrw-Lcup
tatttgtgttaccaaaaagcgaacgaaatttttaattaataataaacgaaaataaacaaaaaaacgaaagcgattactctctgtatgcgtgataacggttaagaatcattatccttagagatattttgagagaaaatgtgttgtaaagattttcttagcaaaaaataatatttctaataaacaacaacaacataaccaacaacaactattcaagcataaatttgaatgcatattccactatacgatcgtacaagtgaaggacaacaagtgtcaggaacaacgttagtgcgatcagtatattcaacatggaaaatcttggttacaaagaaggcagtactaagccacgacgtatgacacgttccattagtgttgttacaaaaagtgaagctgaacagccattggctgagaataatacaaatcgattcaaatcaataccgcctaatcttatggtaagatggcgtaacaatacggatgctatgatagaagctcaatatccaacacccggagaatttgaatatatggaatgtggtccatcgccaccagctgaaagtgcacccagtatgtatgatagtttcgaagagccaaccagtgaattaagtgtacaaatatgcaacgacactttgcgcataagtctaatcgatcaaatgaaaaatgccgccggtcgcatacgctattttgaagatatcgaacagggcaatgtgattggtgaaaatacgaaaacacactttgaatccgcctcgcaaatagagaagaatttatgtttcctatggtcggcatttcttaagagatgggatctcttgcagagtcttttggatataggagcagaattgaatttttgtgatcagaatggtattaccgcattacatttgggtgcgtttagtggttgcctgtcaacgcttacgtttctggtgggcaagggcatgaatgttaatttccagccgaaatgttatactcctctacattgtgcagcgtttggtaattcgcctgaggcggcgaaatatctaattagtaatggtgcccaattgacgatagatacaaataagcccaattgtgaagagagtctcttgcattgtgcggtgagagctaatgctttggagtgtttgcaattgtttatagacgagggagcagatgtaaattccctgaagccaaatggcactaatgctatacacttggcagccgatttgggtaatgcccagtgtttggagattttactcaaggccaacggggcagatcctaatgttagaatatgcatacgtgagaaagaatctacagctttacatttagcagccgatgagggaaatgtagaatgtgtagatttattattggccaaaggagccgatgctaaactaaagaatcatagaggctttaccgcactacatttagcagctcgcacttctagtctagagtgtgtagaatctctgctgagaaatggtaatgccgatgccaatgctgaagactttgatcatagaacacccttacatgcggctgtgggaaaatctgaaaatgcttttgatatcctagaactactaatacaatggggagctaatgttaatcataaggacatatacggttttacagccctacatttagccgctttggatggactggctcagtgtgtggaaatgttaatttaccatggagctgatgttacgacaaagtcgaaaaaaggcacttctgctttaaatgtcataacacgcaaaacacccgcttctgtagctatgattagacaaaaattagatgccgccattacattacatcattcccaggatccagtgaatcgtgaagttgaattggaactggattttcgtcaactcttgcagcattgtcatcctagagaaataagttatttgaatacttttgtggatgagggacaaaaggaaatcttagagcatcctttatgttcttcattcctgtacattaagtggggcaaaataagaaaatactatataggacgtttaatattctgtttcttctttatactcttccttaccctatacgtactcactgctctggcccacaattgttataacggcagtaaagatgacaacaccaccatacaagctcaggaactgtgtcagaaacaatccattttgggtgacatgttacgcaacaatccttttgttatggaaatgcaatggtgggttctggtggctattacggtagtggaaatatttcgaaagttatatggcataacgggttattcatcattcaaacattatgtcacacaagtggaaaatattatggaatggtttgtcattacgagtgtatttgttatttcgtatatttatacgaaacaaacatatacctttcaaaatcacataggagcctttgccgtactgttgggttggaccaatctcatgttaatgattggtcaactgccggtattcgatgtttatgtggccatgtacactagggtccagggagaatttgcaaaactatttatggcctattcttgcatgctaattggttttactatatcgttttgtgttatatttccctcctcctcatcatttgctaatccatttatgggttttatatccgtactggtaatgatgataggagaacaggatttatcactactcatcaatgatcccgatggcaaggatccaccatttcttttggaagttagtgctcaaataacttttgtactgttcttgctattcgttacaattatattgatgaatttactggtgggtatagcggttcatgatatacaaggccttaaaaagaccgctggcctttctaaactggttcggcaaaccaaattgatttcttatatagaatcagctttattcaatggttatttacccacctggctgcgcaatttgctgcactacacggctttggtttcgccgcaagcctaccgcgtagttttgtgtgtaaaacctttaaatcccagcgaaaaacgtttaccgcgtgatatcctaatgaaagcctatgaagtgggtaaaatgcgcaaacattttggtcacaccatatcggccaaatcatctgatgctacttatctatcctataaaaacaaatacaatagcgaaagcaatcaaacgcctacgacaccctatgcgacagaggatttcgaagccaccgttttgtcaaatatcaacactaaaatcgatgataatagtgaacgtattgagtatttaacacaagaaattcaagagctgaaacaggctttaataacccaacaacagcaggctagcaaagttatagataaattattgattgtcatatcgaatcaacagaaaaataatttaagaaaatagtttttaagaatgttaaa

SEQ ID NO: 58 - DNA, 4298 bp, Musca domestica
  wtrw-Mdom
acaactgaaaaaactcaaaatgcgtcttgaaatgcaatgatgtcctttagaaagaaaaaaataatacgtgattaaataaaaaaaaaataataaagaaatattttaaatattttatgaattatttttaaatattaaatagtctccaatgattaaaaaaattaagcataaaataacatcttgcagatacagacaccagaaaaaaggataacattgcttctcgaaaaaaaaaacgaaataatttgttaatggtgttgactgatccagcgattgtttagttttaagaacattttgtcgaggatttaagaccacaccctccaaataaataaaaaaaaggataatagtttcgccgcatgttgagaaaaaatggatgtccttcgacaatgtggataattatggaaacactatatctcatcttaagtttcaaaatttcaatttgaatgcatctgaagaatttgagttttaagatcaacgtcgtcgtcatcgcccactagacagtagagcattgcaataagtaaaccagcagccctcctcctccccccaaagccaaaaccccattccacacctaagaacatagagcaacagcatcaacagcagtagtggttttagactgttactttttttttgtggcccgcgtgcaattagccatggagaatcttggttacaaggagggttcaaccaaaccgcgacgcatgacacgctccattagtgtggtgaccaaaagtgatgctgaacaaccattggcgggcaataatacaaatcgcttaaaatccataccgcccaatctgatggtcagatggcgtaacaataccgatgctatgatcgaagcccaatatccgacaccaggagaatttgaatatatggaatgtggaccatcgccgccagctgaaagtgcacccagtatgtatgatagtttcgaagaacccaccagtgagttgagcgtacagatatgcaatgatacgttgcgcattagcctcatagatcagatgaaaaatgccgctggccgtatacgctatttcgaggatattgaacagggtaatgtgattggagataatacgaagacccattttgagtcggcctcacaaatcgaaaagaatttatgttatctgtggtcggcattcttgaagagatgggatctgttgcagagtctgctggacattggagctgagttgaatttttgtgatcaaaatggcatatcggccatgcatttgggggcattcagcggttgcctgtcgacgttgaattttctggtccagaagggtatgaatgttaatttccagccgaaatgttatacgcccttgcattgtgcagcctttgggaatagtacggaggcagcgaaatatttaataaataatggtgcccagatttcgattgataccaccaaaccgaattgtgaggagagtctgctgcattgtgccgtgagggcaaatgccctggagtgcctgcaattgtttatcaatgagggagctgatgtaaattccctaaaaccgaatggtacaaatgccatacatttggcagccgatttgggtaatgcccagtgtttggaaatattgctaagagctcccggggctgatccaaatgtgcggatttgcatacgtgagaaggaatccaccgccttgcacttggctgccgatgagggtaatgtggagtgtgtggatttgctgctggccaagggagccgatgccaagttgaaaaatcatcgcggatttacagccttgcatttggctgctcgcacctccagcttggagtgtgtggaatccctgctgagaaatggcaatgctgatcccaatgccgaggattttgatcatcgcactccgctgcatgcggcaattggtaaatcggaaaatgcctttgacatcatggagctgctcatacaatggggagcgaatgtcaatcacaaggatatctatggctttactgccctccatttggccgccctggatggtttggcgccttgtgtggaaatgttgatatatcatggtgccgatgtgactacgaaatcgaaaaaaggcaccagtgccttgaatgtcataacacgcaagacccctgcctcggtggccatgatacggcagaaattggatgccgccattaccctacatcattcccaggatccggttaatcgtgaagtagaattagaattggattttcgccagctgctgcaacattgtcatccacgggagattagttatttgaatacctttgtggatgagggccaaaaggagatcctggaacatccgctctgctcttcgtttctctacatcaaatggggtaaaattagaaaatattatatcggacgtttgatattttgttttatttttgtgattttccttacgatctatgtcctcactgccctggcccataattgctacaatgttagcaacaatgacaattccaccatccaggcccaggagttgtgccagtcgcaatcgattctgggtgatatgttgcgcagcaatccctttgtcatggaaatgcaatggggtgtcctggtggccataaccatagttgagatatgtcgtaaactctatggcataacgggctattcctcatttcgccattatgtcacccaggtggagaacatcatggaatggtttgtcataaccagtgtctttctcatctcctatgtgtatacgaagaaaacgtacacgtttcaaaatcacattggggcctttgcggtgctactgggctggacaaatctcatgttgatgattggccagctgccggtattcgatgtctatgtggccatgtacaccagggtccagggtgaatttgccaaactcttcatggcctattcgtgtatgttgattggttttaccatttcattttgtgtgatatttccctcctcctcctcctttgcgaatccctttatgggtttcatatccgtgctggtcatgatgattggagaacaggatctctcgctgctgatcaatgatccggatggtaaagatcctcccttcctattagaagttagtgctcaaattacatttgtattatttctactatttgttaccataattctcatgaatctcctggtgggtattgcggtccatgatattcagggtctcaaaaagacagcgggcctctcaaaactagtacggcaaacgaaattgatttcctacatagaatcggccctattcaatggttatctgcccacctggctacgcaatttactgcactacactgccttggtttcgccccaggcgtatcgtgtggtgttgtgcgtaaagcccctaaacccaagtgaaaaacgtctaccccgtgatatactcatgaaagcctatgaggtgggtaaaatgcgtaaacattttggccacaccatttcggccaagaattccgatgccacatacttgtcgtataaaaacaaatacaacagtgaatcggtacagacacccaccactccgagtacaccctatgccccggaggattttgaggccactgttttggcaaatattaacacaaaaatcgatgacaacaccgatcgtattgaatacttgacacaggaaattcaggaacttaaacaggctttgattacgcaacaacagcaggcaagcaaagttatcgataagttgctaatagtcatttcgaatcagcagaagaataatttaaggaaataatattgaatattgaagataaaaaaattgaaaaattaccaagaaattaatttcgataattttcgataaatgttattttgtcagaaattatgaggaatgggggagccaaattaaagaagaacgataaaatggtattcattgaaccgtcacaaaagtaaataaatataaaaatcgaaaatcattaatgaaattaatttcgataattttcgataaatgttattttgtcagaaattatgaggaatttgggagccaaaatgaaaataatcgataaaatggaattatttgaagtgtcacaaaagttaataaataaaaaaaatagaaaataatcaaagaaattaatttcgataattttcgataaatgatattttcttataaactttgaggaatttggaagccaaaatgaaaataatcgataaaatggaactaattacagtgtcacaaaagtaaataaataaaaaaaattgaaaaataatcaatgaaatgaatttcgataattttcgataaatgttaatttgttataaactttgaggaatttgggagccaaaaaataaaataattgataaaatggacttaattgaattgccacaataatgaataaataaaaaatggaaaataatcaaagaaattaatttcgataaattccgataaatggtatcttgtcatatattataagaatatggaatcccaaaa

SEQ ID NO: 59 - DNA, 3630 bp, Stomoxys calcitrans
  wtrw-Scal
caaaaatatatttaaaccataaaactaagaaaagtggttgccaaactcattaatttgaatttaattgccactctaaagtgcttacttttattctttcatgaaaattgccaatgaaaaattaaatgtagacaaccacaattaaaataaatgctgttcatgctacaacaacactttgaagccaacctaagtgtagctggatgttggttttcagcggtatcgatttgaaaccctaaaggataacaatggataatttacggcttgttttaaattccaattgattttgaatgcatcacatcacaattaacgaggttgaccacgcgcaggcccatgaagtttttttccaatcatcaaaggtgctacgattaaaatttgccaaggttatagcagaaacaggaaaatcttttgggacattttgccattatagtagccatggagaatctcggctataaggagggctctaccaaacccagacgcatgacacgctccataagtgtggtgaccaaaagtgaagctgagcagccattagcaggcaataacacaagtcgcttcaaatcaatcccgcccaatcttatggtcagatggcgtaacaatacagatgctatgatcgaagcccaatacccgacgcctggagaatttgaatatatggaatgtggaccatcaccgccagctgaaagtgcacccagtatgtatgatagtttcgaggaacccaccagtgaattaagcgtacagatatgcaacgacacgctgcgcatcagtctcatcgatcagatgaaaaatgccgccggacgcatacgcttcttcgaggacatcgaacaaggcaatgtgattggcgacaataccaagacccatttcgaatctgcctcacaaatcgaaaaaaatttgtgctacttgtggtcggccttcctcaagagatgggatctcttgcagagtttgctcgacataggagctgaattgaatttctgtgatcagaatggcatcacggctctgcatttgggtgccttcagtggttgcttgtcgacactgagctttctggtgcagaagggaatgaatgtgaatttccagccaaaatgttatacacccctacattgtgcagcatttggcaatagcacagaggctgccaagtacttgatcaacaatggagcccaaatatccatcgataccaccaagccaaattgtgaggagagtctattgcattgtgccgtgagggccaatgccttggaatgcctacaactgtttatcaatgagagtgccgatgtgaattccctaaaacctaacggtaccaatgccatacacttggccgctgacctaggaaatgcccaatgtctggagattttactgcaggcccaaggtgctgatccaaatgtcagaatttgcatacgcgaaaaggaatcgacggctctgcacttggccgccgatgagggtaatgtggagtgtgtggatttactattggccaagggtgccgatgctaaactgaagaaccatcggggttttactgccttacacttggcagcaagaacctctagcttggagtgtgtggagtcgctgctgagaaatggcaatgccgatccgaatgccgaagattttgatcatagaacacctttgcatgcggccataggtaaatctgagaatgcctttgacattatggagctgctgattcagtggggcgccaatgtgaatcacaaggatatatatggctttactgccttgcatctggccgccttggatggcttggcccaatgcgtagagatgctgatctaccatggggcagatgtgacaacaaaatccaagaagggcacttcggctttgaatgtcatcacccgcaaaacaccggcatcggtggccatgataaggcagaaattggatgctgccatcaccctgcatcactcacaagaccccgtcaatcgagaggtggaattggagctggatttccgtcaactactgcaacattgtcatccccgagagattagctatttgaacacctttgtggacgagggccaaaaggagatactagaacatcccctctgctcctcgttcctctacatcaaatggggcaagataagaaagtactacataggccggctgatattctgtttcatattcgtcatattcctaaccatctatgtactcaccgccctggcccacaactgctacaatgtgagtaacaatgacaattccaccagccaagctcaggagctgtgccaatcccaatccatactgggcgatatgttgcgcagcaacccctttgtcatggaaatgcagtggggcgtcttggtggccatcaccatagtggagatatttcgaaaactctatggcatcacgggctactcatcgttcagacactatgtgacccaggtggagaatatcatggagtggtttgtgataaccagcgtatttctcatatcctacgtgtacaccaaaaagacctatacctttcaaaatcacataggagcctttgctgtgctcttgggctggaccaatctcatgttgatgattggccaattgccagtgttcgatgtctatgtggccatgtacaccagggtccagggggagtttgcaaaactttttatggcctactcatgcatgttgataggcttcaccatatccttctgtgtgatatttccctcgtcctcttcgtttgctaatcccttcatgggctttatatcggttttggttatgatgattggcgaacaagatctctcgctgctgatcaatgaccccgatggcaaagatcccccttttctgctggaaattagtgctcaaatcacttttgtcttattcctgctgtttgtcaccattattctcatgaatctgctggtgggcatagctgtacatgatatacagggtctcaagaaaactgcaggcctttcgaaactagtgcggcaaaccaaactcatctcctacatagagtcggccctcttcaatggctatttgcccacctggctgcgtaatctgctgcattacaccgctctggtatcgccccaagcctatcgtgtagtgctgtgcgttaagcccctaaatcccagcgaaaaacgtctaccccgcgacattctaatgaaggcctatgaggtggggaaaatgcgcaaacattttggccacaccatctcagccaaaaacagcgatgccacctatttgtcctacaagaataaatacaacagcgaatcgctgcagactcccacaaccccaagtaccccatacgcaccggatgattttgaggctacgattttggccaacatcaattcaaaaatcgacgacaacaccgatcgcattgaatatttgacacaggaaattcaagaacttaagcaggccttgataacgcaacagcaacaggcaagcaaagttatagataaattattaattgtcatatcgaatcaacagaaaaataatctaagaaaataacatcacagcagtcagtcagcagcattagagatagcagagcacagttatcatgagaatgaaaaaaaatcgaaactgtttaaaattgttatcgaacttgtgagagtatcgcaacactccactacttctctagaattgccatggtatgtgttttacaaataagtgtggcaaattgaaaatatattgccaaagttaataaaaaaggaagaagagaagaaagtctacttcaactattca

SEQ ID NO: 60 - DNA, 3924 bp, Bactrocera dorsalis
  wtrw-Bdor
agtggcaagtcgtggcgcgaacaacagacgagaacaagtaccaaactagaaactaaatatccttcggatgatattaaatactttttgttgaaagtaaatatatttattccgtacaatttggaataaactggaaaaatatgtttcataaccatgacagtgtgcaaactaaaaacagcgtcaaaatgatttagaaacaaacgctaatctaataaaaaaaatcttgacaagactaatgcaacattcttgtggaatttgttcattcaaaataatgtgatgctgtgatgcgtgagagttacatgaagagtaaacaaagtatcctatgaaataaaggagccaatgttaattgtacaacaacgaaaatgtgttgaacttaaaaactagaagaacaactgaatgaatttcaacaaagcaaaaaaaatctaaacaataaagaataatactaaaatatactgtaaaaaaaatatataacaagtgaactaggtaaatatggagaatctcggttataaagagggcactgcgaaaccgcgacgtatggcacgctccatcagcgtggtgacaaagagcgagctggagcaaccattggctggtaataatgccagattcaaatcgataccgccaaatttaatggtacgatggcgcaacaataatgcagacgccatgatagaggcccaatatccgacacccggtgaattcgagtacatggagtgcggaccctcgccgccagccgaaagcgcgcccagcatgtatgatagcttcgaggagcccaccagcgagctaagcgtacaaatatgcaacgacacgctgcgcatcagtctcatcgatcagatgaagagcgccgcaggacgggtgcgtttcctagaggatatcgaacagggcaacgtgatcaaagataacaccaaagcacatttcgaatcagcatcgaaaatcgagaagaatctcagttacttgtgggcagcgtttttgaagcgctgggacttactacaaagtttcctagacataggcgctgaattgaatttctgtgatcaaaatggcatttcggctttgcatttgggcgcctttagcggctgcctatcgacgttaagtttcctagtcggccagtcaatgaatgtgaatctacaaccaaaatgttatacgccgctgcattgtgcagctttcggcaattccgccgaagcggctaagtttctaatcaacaatggtgcactcatcaccatcgacaccaataaaccgaactgtgaggaaagtctactgcactgtgctgtgcgcgccaatgcgctcgaatgcgtgaaactgttcattgtggaaggcgcagacgtgaattctttgaaaccaaatggcaccaatgcgatacacctggcggcagatttgggcaacgcacagtgcttggaggcgctgctgagtgcacctggtgccgatgccaatgtgcggatatgtatacgggagaaggagtcgacagcgttgcatttggccgccgatgaaggcaatgttgaatgcgtcgatctgctgctggcaaagggtgctgatgcgaaattgaagaatcatcgcggctttacagccttgcatttagcggcgcgcacttcaagtctggaatgtgtggaatcgctgttgcgtaacggtaatgccgatcccaacgccgaagactttgatcatcgtacgccgttacacgcggcgataggcaaatcggagaatgcctttgatatactcgagttactaatacaatggggtgccaatgtgaatcataaagatatttatggttttaccgccttacatttagccgcgctcgacggcttggcacaatccgttgaaatgctgatctttcacggcgcggatgtgacaacgaaatcgaaaaagggcacttcagccttgaatgtcatcacgcgtaagacgcccgcttcggtggcgatgatacgccagaaactggatgccgccattacgctgcaccactcacaggacccagtcaatcgcgaggtagagttagaactcgactttcgacagttattgcagcactgtcatccacgtgagataagctatctgaacacatttgtggacgaaggacagaaggaaatactcgagcatccgttatgctcctcgtttttgtacataaaatggggtaaaatacgtaaatactatattggtcggctcatcttctgtttcaccttcgtgctctttctcacactctacgtactaaccgcgctcgcacacaattgctataacggcagcaaggacgacaacacgaccatacaggctaaagagctctgccaaaagcagtccatactcggcgatatgctgcgcaataatccctttgtgatggaaatgcaatggtgggtattggtcgcgatcacaatcgttgagatatttcggaagctctatggtataacgggttattcaacgttcaaacactatgtgacgcaggtggaaaatatcatggaatggttcgtcataactagcgtctttatcatctcctacatatacacgaacaagacatatacctttcagaaccacataggcgcatttgcggtgctattgggttggacaaatctgatgttgatgattggtcaattgccagtcttcgatgtctacgtggcgatgtacacacgtgtacaaggtgaattcgcgaaacttttcatggcttactcgtgcatgctgatcggtttcacgattagtttttgtgtaatctttccctcatcttcgtcattcgccaaccccttcatgggattcatcactgtactggtaatgatgatcggcgaacaagatctatcattgctgatcaacgatcccgacggcaaggatccgccattcttattggaggtgagcgcccaaatcacatttgtgctctttctactcttcgtaacaatcatactgatgaacttattggtcggcatagccgtgcatgacatacagggcttaaagaagaccgcagggctctcgaaactggtacgccaaactaaactcatatcgtacatagagtccgcactctttaacggctatctaccgccttggctacgcaatctattacactatacggcactagtctcgccgcaggcttaccgcgtcgtgttgtgcgtaaagccgttaaatcccagcgaaaagcgtttaccacgcgaaatactcatgaaggcgtacgaagtgggaaaaatgcgtaaacatttcggacatacgatttcggcgaaaggaacagccgcgacttatttgcaatacaaaaacaaatataatgataatcagacgcaaaactactcaatggacgacttggaaacgacacattttaacacgctaacgacgaaaatcgacgaaaatgcggaacgcattgaattcctcacgcaggaaattcaggaactgaagcaagcgctcatcacgcaacaacagcaggcgagcaaagtgatcgataagctattgattgtgatttcaaatcagcaaaagaataatttaaggaaataattgaaatagctgacagcataagagaatttcaaataaaatggcacattgtttagttagtatagtagacgaacgcggatagcaaccagcattaagttatatcatctatacaattagataattctaagcatggcaatataaagtagttagcattgttaatattcataaatataataacgtacgaatatttataatatttttacttatttacattccacacttatgtactgtgtatattatggtatttaaaactttgtttcggaaccaatcggcaaaaaaaagtaaaagctatttggcaaattttattttgtaggactctattaaagaatacgtagatgaaaaaccaaagcagtattgaataacacatttgaaatctgttttccttctttactattttaatattttaatttacttagtataatcctctaaatataatgtaaaagaacaatcttctgatgtttaagattccaataaacaaattttaagttcttgaaa

SEQ ID NO: 61 - DNA, 3874 bp, Zeugodacus cucurbitae
  wtrw-Zcuc
cataacagcagatcactgttcgaagtgaaaagtcgcggcgcgaacaacaaacgaggactagtaccacacaagcataaaaatatccttcggatgtcagtaaaacctgtttgctgatagtgaatattattgcgaaaagtttggaataaaccaaaaatatgattcatacctacataggtagcttgaaattattcgatgacaatgtacaagctcataacatcgataaagtgatttagaacaaacgtcaattaattaaaaatgttaacaaggaagttgcattcaaaatattgtgatgtgcgagagttacacgaagagtaaaccaagtattctatgaaataaagaagccatctaacaccaactatattacaagaaaaatgtgttaaacgtaaaacactcaaataaagaactgcatgagcttgcaacaaagcaaaaataaacaataaagaagcgcaaaaaaatattataaaataaatcaaaaattaaaaaaagtgaaataatttagcatggagaatctcggttacaaggagggcactgcgaaaccgcgacgtatggcacgctcgatcagcgtggtgacaaaaagcgagctggaacagccattgaccggtaataatgccagattcaaatcgataccgccaaatttaatggtacgatggcgcaacaataatgtggacgccatgatcgaggcccaatatccgacacccggtgaattcgagtatatggagtgcggaccctcgccgccagccgaaagtgcgcccagcatgtatgatagcttcgaggaacccaccagcgagctaagcgtacaaatatgcaacgacactctgcgcattagtctgatcgatcagatgaagagcacagctggacgtgtgcgtttcctagaggatatcgaacagggcaatgtgattaaagacaataccaaaacgcatttcgagtcagcgtcgaaactcgaaaagaatctcagcttcttgtgggcagcattcttgaaacgttgggacttgctgcagagtttcctagacattggcgccgaattgaatttctgcgatcaaaatggcttttcagccttgcacttgggcgccttcagcggttgcctatcgacgctaagtttcctggtcggccagtctatgaatgtgaacctacaatcaaaatgttatacgccactacattgtgcagccttcggaaattccgccgaagcggccaaatttctaatcaacaatggtgcacttgtcaccatcgataccaacaaacccaactgtgaggagagtctattgcactgtgctgtgcgcgccaatgcgctcgaatgcgtgaagctgttcattgtggagggtgcagatgtgaattccttgaagccgaatggcaccaatgccatacacctggctgcagatttaggtaacgcgcagtgcttggaggcgttgctgaatgcacctggtgccgatgccaatgtgcgaatctgcatacgggaaaaggagtcgacagcattgcatttggctgcggatgaaggcaatgtggaatgtgtcgatctgctgttagcaaagggcgcagatgcgaaattgaaaaatcatcgcgggtttacagcattgcatttggcggcgcgcacctctagtctcgaatgtgtcgaatcacttttgcgtaacggcaatgccgatcccaatgccgaagacttcgatcatcgtacgcctttgcatgcggcggtcggcaaatcggaaaatgcctttgatatactcgagacactgatacaatggggtgccaatgtaaatcacaaagatatttatggctttaccgctttacatttagctgcgctcgacgggttggcgcaatgcgtagaaatgctgatctttcacggcgcagatgtgacaacaaaatcgaagaagggcacttcggccttgaatgtcatcacgcgtaagacgcccgcttcggtggcgatgatacggcagaagctcgatgccgccattacgttgcaccactctcaggacccggttaatcgcgaggttgagttagaactagactttcgccagttgttgcaacactgtcatccgcgcgagataagctacctgaatacatttgtggacgaaggccagaaggaaatactcgagcatccattgtgctcctcatttttgtacatcaaatggggtaaaatacgtaaatactatgttggtcggcttatcttctgcttcacattcgtgctctttctcacactctacgtactcacggcactcgcacataattgttacaacggtagcaaggatgataacacgactatacaggctcaagagctctgtcaaaagcagtctatactcggcgatatgctgcgcaataatcccttcgttatagaaatgcaatggtgggtactggtcgctattacagtcgttgagatatttcgtaaactctacggaataaccggttattcaacgttcaaacactatgtgacgcaggtggaaaacattatggaatggttcgtcataactagtgtcttcatcatttcccacatatacacgaacaagacatacacctttcagaaccacataggcgcttttgcggtgttgttgggttggacaaatctaatgttgatgattggtcaattgccagtcttcgatgtctatgtggcgatgtacacacgagtccaaggtgaattcgcgaaactcttcatggcttactcgtgtatgttgatcggtttcacgatcagcttttgtgtgatctttccttcatcttcttcattcgccaaccccttcatgggattcatcactgtactagtaatgatgatcggcgaacaagatctttcgttgttgatcaacgatcctgatggcaaggatccacctttcttattagaggtgagcgcacagatcacctttgtgctctttttactcttcgtgacaatcatactaatgaacttgttggtcggcattgccgtgcacgacatacaaggcttgaagaagaccgcaggcctctcgaaattagtgcgccaaacgaaactcatatcctacatagagtccgcactcttcaacggttatctaccgccctggctacgcaatctcttacactacacggcacttgtatctccgcaggcctatcgcgtcgtgttgtgcgtgaaaccgctgaatcccagcgaaaagcgtttaccacgtgaaatactaatgaaggcctacgaagtgggaaaaatgcgaaaacatttcggacatacaatttcggcgaagggtactgccgcgacttatttgcaatataagaacaaatacaatgacaatcaaacgcagaactattcgatgaatgatatggaaacggtacattttaacacgctaacgacgaaaatcgacgaaaatgcggaacgcattgaattcctcacgcaagaaattcaggaactgaagcaagcgctcatcacgcaacagcagcaggcgagcaaagttatcgataagctattgattgtgatttctaatcagcaaaagaataatttaaggaaataattgagaggaacagtttgagcgaatttcagataatatggaatatataagattctctagttactatatcattattaataatatatacatatgtatttggatgtatgtatgtagtaaataaacgcgttatttatttagtgctgtgaaggcgaaggtgggcatgagctgatggataattagataatgtaaacatggcattataaagtagttagttgttaatatatatataaatatacatataacatatgagtattaataatatttttacttatttacatttcatacctatgtactatgtatattatgtaaaactttgttgcggaacttttcggcaaaaacgcgaattggcaatgtcattttgtagaacttggataaagtagacgaagataaaagaccaatgcagtattgaataaagcgattgaaaactgttt

SEQ ID NO: 62 - DNA, 3598 bp, Ceratitis capitate
  wtrw-Ccap
catatgtacgtcaagccgtgaggacaaacaactttacctataattaaaagcacaacaaaatgtattgtacaaattagtataatgtaaaatgctaactgaatgaatttccaagaatttgaaccagaataaaaaaaaaccttgtatcttattgaaagatatatgtacgtacatgacaaataaataaagcagaagcaaaaaaaaaataataataatatggagaatctcggctataaggagggcaccgccaagccgcgacgtatggcacgctctatcagcgtggtgacaaaaagtgaactggaacagccgttagtcggcaataacgcaagatttaaatcgataccgccgaatttaatggtacgatggcgcaacaataatgctgacgccatgattgaagcacaatatcctacacccggtgaattcgagtacatggaatgcggaccctcgccgccagctgaaagtgctcccagcatgtatgatagctttgaggagcccaccagtgaactgagtgtacaaatatgcaacgacactttgcgcatcagcctaatcgatcaaatgaagagcgccgcggggcgagtgcgttttttagaggatatcgagcaaggcaatgtgatttcagaaaatgcaaaaacacatttcgaatcagcatcgaaaatcgaaaagaatctcagttatctgtgggcagctttcttaaagcgatgggatttattacaaagctttctagatattggcgccgaattgaatttctgcgatcaaaatgggatatcagcattgcatttaggtgccttcagcggttgcctatcgactttgagttttctcatcggcaaaagtatgaatatcaatttacaaccgaaatgttacacaccgctccattgcgcagcctttggcaattccgctgaagcggcaaaatttctaatcaataacggtgcactaatcacaatcgacaccaacaaaccaaactgtgaggaaagtctattgcattgcgcagtgcgcgccaatgcgctcgagtgtgtgcagctattcattgtggaaggcgcagatgtaaactcgctaaagccaaatggcaccaacgcaatacacctggcagcagatttgggtaacgcacaatgcttggaggcgctgctgaatgcacccggtgctgatgctaacgttcgcatttgcatacgtgaaaaggagtcgacagccttgcatttggctgcggatgagggcaatgttgagtgtgtcgatctattattagcaaagggtgctgatgcaaagctaaaaaatcatcgcggcttcacagcattgcatttggcggcgcgtacatctagtctggaatgtgttgagtcgctactacgtaatggcagtgcagatcccaatgccgaagatttcgatcatcgtacgcccctgcatgcggcggttggtaaatcggaaaacgctttcgatatacttgaaaccttgatacagtggggcgccaatgtaaatcataaggatatttatggatttacagcattgcatttggctgcgcttgacggcttggcgcaatgtgtggagatgttgatctttcatggagcggatgtgactacaaaatcgaaaaaggggacttcagcattgaatgtcatcacacgtaaaacaccagcttctgtggcgatgatacgccaaaagctggacgcggccattaccctccaccattcgcaggatccagtcaatcgtgaagtggagttagagctggactttcgtcagctgctgcagcactgtcatcctcgtgagatcagctatctgaatactttcgttgacgaaggtcagaaagaaatactcgagcacccattgtgctcctcctttctatatattaaatgggggaaaatacgtaaatactatataggacgcctaatattctgtttcacttttgtgctcttccttacactttacgttctgaccgcactcgcgcataactgctacaacggcagtaaggatgacaataccacaatacaagcacaggaattatgccaaaaacagtccatactgggcgatatgctacgaaataatccattcgttatggaaatgcaatggtgggtattggtcgccatcacaattgtggagatatttcgtaagctctacggcataactgggtattcgacgttcaaacattatgtgacacaagtggaaaacattatggaatggttcgttataaccagtgtttttgttatttcctacatatacacgaaacagacatacacctttcaaaatcacatcggtgcattcgcggtgcttttaggttggacgaatttgatgttgatgattggccaattaccagtcttcgatgtctacgtagcgatgtatactcgtgttcaaggtgaatttgcgaaactgtttatggcctactcgtgcatgctaataggcttcacgattagtttttgtgtgatctttccatcttcttcttcatttgccaatcctttcatgggatttatcacggtcttagttatgatgatcggcgaacaggatctttcgttgttgatcaatgatcctgacggcaaggatccaccatttctattggaggtgagcgcgcagataacttttgtgctatttctactcttcgttacaatcattctgatgaatttattagttggtattgctgtacacgatatccaaggtctgaaaaagacagctgggctatcgaagttagtgcgtcaaaccaaacttatttcctatatagaatcagcgctttttaacggttatctaccgccttggttacgcaatctattacactatactgcgcttgtttcaccacaggcctatcgagttgtcttgtgtgtaaaaccgcttaatccaagtgaaaaacgtttgccacgtgaaatactaatgaaagcttacgaagtaggaaaaatgcgaaaacattttggacatacaatttcagcgaaagggactgcggcaacttatttacaatacaagaacaaatataatgataatcaagcccaaaactatgcagtagacgacttggaagcagcacattttaacacgataacggcaaaaatcgacgataatgcagaacgtattgaatttctcacgcaagaaattcaagaactgaaacaggcattgattacgcaacagcaacaggcgagcaaagtgattgataaacttttgatagtaatttcaaaccagcaaaaaaataatttaaggaaataattattacataaatttgcaggaatagaaaagcaaaaatttgtatttgtatttgacatacatacatatgtacgaaaatttgtgaaagttttacggttgtgtcagagtcgagtattcaaaacaatttaaaggtaaaacagtggaaaaaacagaaaatgtttttttttttgccttaaatacttcataatatccgaattttatttacttcagatctactcacgcagccgtatattatgtattgtagttttaagaaaatgttgagatattataaaattagacatatatgtatggcttagtaaataattatttatattatatgtgtagatttaatagagaggaggtggagcaaaaagttggatgcgaaatgaatttataacgtttaataaattagacaaaaatcgctgcaaacaaaaagcagctagtgttatttatataaataaat

SEQ ID NO: 63 - DNA, 3651 bp, Drosophila melanogaster
  wtrw-Dmel
cgagagtgcgccaagtgtcggaaaatattacatcgcttcaagaaaattccacaccagataacatctcacaaaaaaggatactttctgaagcaaaatgtcgcgatcatcgattatgatacgccgcgggttctgcagttaaaaacattgacataatgcagtgacaaaaaaacgaagttgcattgcaccgaggtttttgtgcatatttgcgcgttttaattgccacaaccacgaaagcagcagcattgacaccggcggcggaggcgacgacgactgcagcagcaacttctggccgtcaccatggagaatcttggctataaggagggcagcaccaagccccgccgcatgacacgttcgatcagcgtcgttaccaagaccgaagtggaacagccgctcacggagaataatgcaaataaccgcttcaaatcgattccacccaacttgatggtgcgatggcggaacaacactgacgccatgatcgaagcccagtacccgaccgctggagaattcgaatacatggagtgtggaccgtcgccgccggcggagagtgcgccgagcatgtacgacagcttcgaggagccgaccagcgagctgagcgtccagatatgcaacgatacgctgcggataagcctgatcgaccagatgaagagcgcagcggggcgcgtcaagctcttcgaggacatcgagcagagcaacgtggtggccgagggcatacggacgcactttgagtccgcctcaaagctggagaagaatctctgctacctgtgggccgcgtacctcaagcgctgggatctgatcgagagtctgctggaggcgggagccgacctgcacttctgcgatcagaacggaatatcagccttgcaccttagcgccttcagtggctgcttggccaccttgggccttctggtcgccaagggtttgaatgtcaatctgcagtccaagtgctacacccctctgcactgcgcagcctttggaaatgctgcggaggcagcaaagctactgatcaacaatggggcggacatatccaaggacaccagcaagccaaactgcgaggagagcctgctgcactgcgccgtgcgttccaatgccctggagtgtctgcagatcttcattgccgaaggcgccgacgtcaactcgctcaaaccgaatggcaccaatgccattcacctggcagctgatctgggcaatattcagtgtctggaagccttactgaatgctcccaatgcagatgccaatgtgcgtatctgcatccgcgaaaaggagtccacagccttgcatctggcagcagatgagggcaacgtggagtgtgtggacttactcctggccaaaggtgctgatgcgaagttgaagaaccatcgcggtttcacaccgctccacctggcagctagaacttccagtctggactgcgtagaatcgttgctgaggaatggcaatgccgacgccaatgccgaggacttcgatcaccgtactccgcttcacgcggcggtgggaaaatcggagaacgcctatgacatcatggaaacgctcatccagtggggtgccaatgtcaatcataaggacatttacgggtttacagctcttcacctggctgcgttggatgggctggtgcagtgcgtcgagatgctgatattccacggagcggatgtgaccaccaaatcgaagaaaggtacctccgcgttgaacgttatcacccggaagaccccggcttcagtggccatgatcagacagaaactggacgcagctattacgctgcaccactcgcaggaccccgtgaaccgtgaggtggaattggagctggacttccgtcagctgctacagcactgtcatccgcgcgagatcagctacctaaacacgttcgtcgacgagggtcagaaggagatactggagcacccgctctgctcctcgtttctgtacatcaagtggggcaagatccgcaagtactacattggcaggctcatcttctgcttcagcttcgtgcttttcctcacgctttacgtgctgactgctttggcccacaactgctacaatgggagcaagaacgacaacacgaccattccagcgcaggagttgtgccagaagcaatccatcctgggagatatgctcagaaacaacccctttgtgatggagatgcaatggtgggttctggttgccatcaccatagtggagatttttcgaaagctatatggcattacgggctactcctcatttcggcactacgtaacgcaagtggagaacataatggagtggttcgtgataaccagcgtgtttgttatatcctacatctacaccaacaagacgtacacgtttcaaaaccacataggcgccttcgccgtgctgctcggttggacaaatctcatgttgatgataggtcagctgccggtcttcgatgtctatgtggccatgtacacgagagtccagggggaattcgcaaagctatttatggcctattcctgcatgctgattggttttaccatcagtttctgtgttatcttcccatcgtcgtcgtcgtttgccaatccgtttatgggcttcataacagtgctggtgatgatgattggtgaacaggatttatcgctgctcatcaacgatcccgaaggcaaggatccacctttcctgctagaagtcagcgcacaaatcacttttgttctgttcctgctgttcgtgaccatcattctgatgaacctgctcgtgggcattgcagtgcatgatatccaaggattgaagaagacggcggggttgtctaagctcgtgcgtcaaacgaagctgataagctacatagagtcggcgctattcaacggctaccttccgacatggctgcgcaacttgctccattacaccgcgctggtctctccccaagcttatagagtggttctgtgcgtcaagccactgaatcccagcgagaaacgcttgccccgggaaatcctaatgaaggcttatgaagtaggaaaaatgcgcaagcatttcggtcatactatctcgtcaaagaactcagccgaaaactatttgtcgtacaagaacaagtataacaacaataatggcgccacgaccggatatgtactacccgattcggacccggatgccgggcaattcaccacactaaccacaaagatcgatgacaatgctgatcggatcgagttcctcacccaggagatccaggagctaaagcaggcgctcatctcgcagcaacagcaagccagcaaggtgatcgacaagctgctgattgtgatctccaatcagcagaaacagaatctgcgcaagtagcaggagcatttactgcaccccattcggaatatttatagatcacagtttgaccttttttagacgtaagggggtcgtgtaggccccaaagaatccagaacattgttgatattatcgtagcagcgagttgtagttaaaccaattttgatatcgatgcgccaggcgcaatatgcatacgctatatagccatatatcctacatacactacactattgatacaaatactataactagcgtttagttgaactagaggcgagcagttggcaggattgatttgtggctggttccaggctgtgtctttgttgttttggcgttgtcgtcagagaatcgtttatatagtaatttaatgcaaattattactcttaataaagtatatgctatatatctattgttatg

SEQ ID NO: 64 - protein, 815 aa, Aedes aegypti
  nan-Aaeg
MGNTESNVTSGVKKQAGVSTQALYKFVNLKGGGLLVDMMKRAIQNKQYAEIDHAIKTKVEPFLYNKGKGKYIPVAQLVLLRNRERPRSKQLPEIRALENPEEDFDIDAVCPDVTEGEYQRNPSGYREVCWNIKERGAVGETILHLCLLNATSLHADLAKRLLRFYPKLINDIYMCDEYYGESVLHVAIVNEDPAMVKYLLDSGSDVDERCCGTFMCPEDQKATRYDSIETEIICVLPMTNYDGYVYWGEYPLSFAACLGQEECYRLVLARGADPDNQDSNGNTVLHMLVIYEKISTFDMAYEVGSSLDIRNLQNLTPLTLAAKLGRVEMFFHIMNIEREIYWQLGAITCAAYPLALIDTIDIETGNINKDSALNLVVFGDKAEHLDLLEGVLIDLLKTKWNSFVKDKFYRQFFVFFWYFCVSLVSFTLRRGPMNLEETAANRTTTSITLKNLTFSDSTNATLPTLLAADVNEKIVQFIANETLFDPAVMEENTFFNSKCATMAYDTLQDKIRLVSEIIILIGSFLYLVGALREFRFLGRKMFFENLMISPSRVMFLFSCCIMMIVPFLKVLCLIELEDHVAVTIMLTTAPYFLFFCRGFKTVGPFVVMIYRMVMGDLLRFVVIYLVFVMGFSQAYYIVFLSFKGEEEGDENPMPSPMESIVAMFLMSLTNFGDYYGALEKTEHEGCAKVLFVIFMVIVAVLLVNLLIAMMGNTYTMIAETKNEWQRQWARIVLVVERGVPPSERLKNFMSYSQPMSDGRRALVLRLHMTDEDKEEMKEILEMKRVHERLKKKRQVERELRAEQRRLIMEKYANVP

SEQ ID NO: 65 - protein, 816 aa, Culex quinquefasciatus
  nan-Cqui
MGNTESNVTSGVKKQAGVSTQALYKFVNLKGGGLLVDMMKRAIQNKQYAEIDHAIKTKVEPFLYNKGKGKYIPVAQLVYLRNRERPRHKQLPEIRALENPEEDYDIDKECPDVTEGEYMRNPGGYREVCWNIKERGAVGETILHLCLLNATSLHADLAKRLLRFYPKLINDVYMCDEYYGESVLHLAIVNEDPAMVKYLLDAGSDVNERCCGTFMCPEDQKASRFDSLETEIICVMPQTNYDGYVYWGEYPLSFAACLGQEECYRLVLARGADPDNQDSNMNNVLHMMVIYEKLTTFDMAYEVGSSLSIRNLQNLTPLTLAAKLGRVEMFFHIMNIEREIYWQLGSITCAAYPLALLDTIDIETGNISKDSALNLVVFGDKDEHLDLLEGVLIDLLKTKWNTFVKDKFYSQFFVFFCYFCVSLISFTLREGPMKLEDGEANKTTTSIQLKNMTLADLTNASTLSSLLVTDVSGKIVGLNGSETFFDPSTIESDMFFNSKCPTMIYKGIEGKIRLVSEAIILVGSFLYLVSALRESRFLGRKMFIENLMTAPSRVMFLFSCCIMMVVPCLKVLCFTELEDHVAVVIMLTTAPYFLFFCRGFKTVGPFVVMIYRMVMGDLLRFVAIYSVFVMGFSQAYYIAFLSYKGEEEGDENPMPSPMESIVAMFLMSLTNFGDYYAALEDTAHEGCAKVLFVTYMVIVAVLLVNLLIAMMGNTYTKIAETKNEWQRQWARIVLVVERGVPPAERLKNLMNYSQPMSDGRRALVLRLNMTEEDKEEMKEILDMKRVHERLSKKRAVEREARAEQRRLIAEKYANVP

SEQ ID NO: 66 - protein, 840 aa, Anopheles darlingi
  nan-Adar
MGNTESNVTSGVKKQAGVSTQALYKFVNLKGGGLLVDMMKRAIQNKQYAEIDHAIKTKVEPFLYNKGKGKYIPVSVLVLLRNSERPRHKQLPEIRALENPEEDFDIDAVCPEVSEAEYYLNPSGYREVCWNVKERGAVGETILHLCLLNATSLHADLAKRLLRFYPKLINDVYMCDEYYGESVLHLAIVNEDPAMVKYLLDHNSDVNERCCGTFMCPEDQKASRYDTPETEVVQMVQLTNYDGYVYWGEYPLTFAACLGQEECYRLVLARGADPDNKDFNGNTVLHMLVIYEKITTFDMGYEVGSSLSIRNHQNLTPLTLAAKLGRVEMFFHIMNIEREIYWQLGSITCAAYPLVLIDTIDVETGNISKDSALNLVVFGDKDEHLDLLDGVLIDLLKTKWNTFVKDKFYRQFFMFFCYFCVSLIGFTLRNGPPPPEEDDENRAGGGSGNKTSSASKQDLRQRLWNRTVTLEDADNVSSLLSDIMGIDALGKLAEQLLNGSEGSGAFKPETVEEEEDGLFFNSKCHTMDYDGVEGKVRFVAEVIILIGSFLYLLSALRELKFLGRKMFFENLMTAPSRVMFLFSCCIMMVVPFLKVLCFTELEDHVAVAIMLTTAPYFLFFCRGFKTVGPFVVMIYRMVMGDLLRFVVIYLVFVMGFSQAYYIVFLSYKPEEDGDANPMPSPIESIVAMFLMSLTNFGDYYGALENTDHEMCAKILFVLFMVIVAVLLVNMLIAMMGNTYQKIAETKNEWQRQWARIVLVVERGVPPKERLKNLMSYSQPMSDGRRALVLRLNMTDEDKEEMKEILEMKRVHERLSKKRQVERDARAEQRRLLREKYLNMT

SEQ ID NO: 67 - protein, 833 aa, Anopheles gambiae
  nan-Agam
MGNTESNVTSGVKKQAGVSTQALYKFVNLKGGGLLVDMMKRAIQNKQYAEIDHAIKTKVEPFLYNKGKGKYIPVSVLVLLRNRERPRHKQLPEIRAMENPEEDFDIDAVCPEVSEAEYYLNPSGYREVCWNIKERGAVGETILHLCLLNATSLHADLAKRLLRFYPKLINDVYMCDEYYGENVLHLAIVNEDPAMVKYLLDHNADVNERCCGTFMCPEDQKASRYDTPETEVVQMVQVTNYDGYVYWGEYPLTFAACLGQEECYRLVLARGADPDNKDFNGNTVLHMLVIYEKIATFDMGYEVGSSLSIRNHQNLTPLTLAAKLGRVEMFFHIMNIEREIYWQLGSITCAAYPLGLIDTIDVETGNINKDSALNLVAFGDKDEHLDLLDGVLIDLLKTKWNTFVKDKFYRQFFMFFCYFCVSLVSFTLRNGPPPAEDDDGKESEAGGNKTAAVTKEELRRQLWNETTLEDALAALAGNGSFAGRLSNLEQSNGSSDAMGEFDPAEMDDEGLFFNSNCHTMDYDGVEGKVRLISEMIILVGSFLYLLAALRELKFLGRKMFFENLMTAPSRVMFLFSCCIMMIVPFLKVLCFTELEDHVAVTIMLTTAPYFLFFCRGFKTVGPFVVMIYRMVMGDLLRFVVIYLVFVMGFSQAYYIVFLSYKPDEEGDPNPMPSPIESIVAMFLMSLTNFGDYYGALENTDHEMCAKILFVLFMVIVAVLLVNMLIAMMGNTYQKIAETKNEWQRQWARIVLVVERGVPPKERLKNLMSYSQPMSDGRRALVLRLNMTEDKEEMKEILEMKRVHERLSIKRQIERDARAEQRRLLREKYLNMSS

SEQ ID NO: 68 - protein, 844 aa, Ceratitis capitata
  nan-Ccap
MGNTESNVTSGVKKQAGVSTQALYKFVNLKGGGLLVDMMKRACQTKQFAEIDHAIKTKVEPFLYNKGAGRYFPISKLVLLRNKERARTKQLPEIRAMENPDEDFNIHDHCTEVSEAEYISNPSAYRYVCWNLNERGAVGETILHLCLLNASSLHADLAKRLLKFYPKLILDVYMCDEYYGESVLHIAIVNEDPAMVKYLLDAGADVQERCCGAFMSAEDQKASRYDSPDHEYVGVQPMTNYDGYVYWGEYPMSFAACLSQEDCFRLVLARGADPNLQDTNGNTSLHMLVIYEKIEMFDVAYEVGTNIHLRNVQNLTALTLAAKLGRVEMFFHILSIEREIYWQLGSITCAAYPLSMIDTIDVETGNINKDSVLNFVVFGDKLEHLELLDGVVIDLLKTKWESFVKSRFYKQFYMFSFYFLFSLISFISRPGPTEKNEDDDDDDDADASVEATVTRAANSTAPLQRGDQWFKRLIKRAIDKMEYKTFWLNFTDYFDDNDVESVPPWWASYAECPLMNMESDLAKLRIVAEIIIFFGSVLYLFAALREARFLGYKMFVENMMTAPSRVMFLFSCALMMSIPWLRVFCLTEIDDHVAVFIMLTTAPYFLFFCRGFKTVGPFVVMIYRMVMGDLIRFVSIYLVFVMGFSQAYYIIFLTFDNPATPEEIDDSESNPMPSPMESIVAMFLMSLTNFGDYFGGMASTQHEYEAKTLFFLFMVIVSVLLVNMLIAMMGNTYQKIAEIRNEWQRQWARIVLVVERSVPPAERLKNFMHYSQPMSDGRRALVLRLNMSDEVKEEMKEVQETKRIHQRFSKKRQIEREARAQKRQEEYEKFFGKKPSGNSDNNNA

SEQ ID NO: 69 - protein, 838 aa, Musca domestica
  nan-Mdom
MGNTESNVTSGVKKQAGVSTQALYKFVNLKGGGLLVDMMKRACQTKQFAEIDHAIKTKVEPFLYNKGAGRYFPISKMVLLRNKERARTKQLPEIRALENPDEDFNIHDYCSEVSEAEYISNPSAYRFVCWNLNERGAVGETILHLCLLNASSLHADLAKRLLKFYPKLIMDIYLSDEYYGESVLHIAIVNEDPAMVKYLLDANADVQERCCGAFMSAEDQKASRYDSPEHEYVGVHPMTNYDGYVYWGEYPLSFAACLSQEECFRLVLARGADPDSQDTNGNTVLHMLVIYEKIDMFDVAYEVGTNIHIRNVQNLTPLTLAAKLARVEMFFHILSIEREIYWQLGSITCAAYPLSKIDTIDVKTGNINKDSVLNFVVFGDKLEHLELLDGVVIDLLKTKWETFVKSRFYKQFYMFSFYFLFSLVSFISRPGPKIEDEDEEGDANDSAGKGNDSTTNARLLYATPASRVTGIEKLPYKTFWLNFSEYIDDDANAENMPSWWASYEECPLMDMETNLAKFRIVSEIVIFFGAILYLLSALREAKFLGYKMFVENLMTAPSRVMFLFSCCLMMTIPWLRLSCLTELDDHVAVMIMLTTAPYFLFFCRGFKTVGPFVVMIYRMVMGDLIRFVSIYLVFVMGFSQAYYIIFLTFDNPATPEEIDDTGTNPMPSPMESVVAMFLMSLTNFGDYYGAMGSTQHEYEAKILFFLFMVIVSVLLVNMLIAMMGNTYQKIAEIRNEWQRQWARIVLVVERSVPPAERLKNFMQYSQPMSDGRRALVLRLNMSDEDKEEMKEVQEMKRIHQRFSKKRQMEREARAKKRQEEYEKFFGATPTSDNENNNF

SEQ ID NO: 70 - protein, 833 aa, Drosophila melanogaster
  nan-Dmel
MGNTESNVTSGVKKQAGVSTQALYKFVNLKGGGLLVDMMKRACQTKQFAEIDHAIKTKVEPFLYNKGAGRYFPISKLVLLRNRDRPRTRQLPEIRALENPDDDFNIHDYCPEVSEAEYISNPTAYRFVCWDLNMRGAVGETILHLCLLNASSLHADLAKRLLKFYPKLILDIYMSDEYYGESVLHIAIVNEDPAMVKYLLDANADVQERCCGAFMSAEDTKFSRTDSPDHEYVALCPMTNYDGYVYWGEYPLSFAACLSQEECFRLVLARGADPDFQDTNGNTVLHMLVIYEKIEMFDVGYEVGTNIHIKNIQNLTPLTLAAKLGRVEMFFHVMSIEREIYWQLGSITCAAYPLLMIDTINEETGNINKDSVLNFVVFGDKLEHLELLDGVVIDLLKTKWDTFCKSRFYKQFYMFALYFLISLFSFILRPGPDAKDEDEDGANSTTAKSDLYRQNGSDSYHLHSKRATMTTEYKTFWLNFTEYYDPSEVEVLPAWWESYAQCPLMNLESDLAKLRIMAELLNFVGAILYLLVALREARFLGLKMFIENLMTAPSRVMFLFSCALMMTIPWLRVSCLTEIDDHVTVVIMLTTAPYFLFFCRGFKTVGPFVVMIYRMVMGDLLRFVSIYLVFVMGFSQAFYIIFLTFDNPSSPEDQDAESNPMPSPMESIVAMFLMSLTNFGDYYGAMVSTQHEYEAKILFFLFMVIVSVLLVNMLIAMMGNTYQKIAEIRNEWQRQWARIVLVVERSVPPAERLKNFMQYSQSMSDGRRALVLRLNMTEEKEEMKEVQEMKRIHQRFAKKRQMEREARALRRQQEYEKFFGTAPKSECSDNNNF

SEQ ID NO: 71 - protein, 903 aa, Acromyrmex echinatior
  nan-Aech
MGNTESNVASSVKKQTDTSSILLYKLVDLKGGGLLVDMMKRATQTKQFAELDHAMRTKVEPFLYNKGKGKWIPVDKLVLLRNKDRPRHKMLPPLKAMENPADYDIDKDMGDEEVDEAKIDKSKYRLVCWNLSDRGAVGETILHLCMLHATAIHADLAKRLLRFYPKLINDIYLSDEYYGENVLHIAIVNEDPSMVKFLLDSGADDPCIIHERCFGNFMCPEDQKASRFDNMDHEWVCVSPETNYNGYVYWGEYPLSFAACLGQEECYRLILARGADPDKQDTNGNTVMHMLATFDMAYEVGASLGIRNVQHLTPLTLAAKLARIEIFFHIMNIEREIYWQIGSITCAAYPLSQIDTIDVNTGTINNNSALNLVVFGDKDEHLELMDGVLVDLLNAKWNTFVKSRFYNQFFLFCFYFVLSLISFTLRPGPSTIETDENANDTSTRTNSSNITEPIIHKTLQSSDLSELVTNSLVAAFTSNFKSSLNMTQESLEKIQLQVTSNITSALKSILLLTLNENEGILSPPDEATIHTLWYTDSPPNASDYFMNTYNKTDANSTVKTIIDGVARPKFKSNYWWDDFSEECRLMQLSEMSAKIRLTAEIFMFIAAVLYILAALREAKFLGLHMFIENLMTVPSRVMFLISCCILMWFPVLRFTCSDEVEDMLAVVVMLTTAPYFLFFCRGFKTVGPFVVMIYRMIMGDLIRFVSIYLVFVMGFSQAYYIIFLSFDNPNTPEGIDDSITNPMPSPMESVMAMFLMSMTNFGDYFGAFDRTEHEFEAKLLFVLYMAIVAILLVNMLIAMMGNTYQKIAETRNEWQRQWARIVLVVERGVSPAERLKKLTDYSQPMSDGRKALVLRLNQTEEDKEEMKEILEMKRTHDRLLKKRQNRMSKEKIIFETEPIITKN

SEQ ID NO: 72 - protein, 898 aa, Solenopsis invicta
  nan-Sinv
MGNTESNVTSGVKKQTDTSSILLYKLVNLNGGGLLVDMMKRASQTKQYAELDHAMRTKVEPFLYNKGKGKWIPIEKLVLLRNKDRPRHKMLPPLKAMENPADYDIDKDMGDEEVDEAKIDKSKYRLVCWNLSDRGAVGETILHLCMLNATAIHADLAKRLLRFYPLLIYDIYLCDEYYGENVLHIAIVNEDPSLVKFLLDSGADDPRIIHERCFGTFMCPEDQKASRFDSMDHEWVCVTPETDYNGYVYWGEYPLSFAACLGQEECYRLILARGADPDKQDTNGNTVLHMLVIYEKIATFDMAYEVGASLDIRNVQHLTPLTLAAKLARIEMFFHILNIEREIYWQIGSITCAAYPLSQIDTIDVNTGTINKTSALNLVVFGDKDEHLELMDGMLVDLLNAKWNTFVKSRFYRQFFLFCFHFVLSLISFTLRPGPSTMETDENANDTSTKTNSSNITEPIILKPLQSSDLSELVTNSFVAAFASNLKSSLNMTQESLEKIQLQVTSNITSALKSILLLTLNENEGILSPPDEATIHTPWYTDSSPNTSDYFTDLYNKTVVAENSTVKAVVDDVAQTDYWWDDFAEECRLMQLTETSAKIRLTAETFMYIAAVLYILAALREARFLGLNMFIENLATAPSRVMFLFSCCILLSFPFLRFVCADEIEDILAVVVMLTTAPYFLFFCRGFKTVGPFVVMIYRMIMGDLLRFVCIYLVFVMGFSQAYYIIFLSFDNPNTPEGTDDSITNPMPSPMESVMAMFLMSMTNFGDYFGAFERTEHEFEAKLLFVLYMVIVAILLVNMLIAMMGNTYQKIAETRNEWQRQWARIVLVVERGVSPAERLKKLTDYSQPMSDGRPALVLRLHQTEEDKEEMKEILEMKRTHEKLLKKRQCRMSKEKILS

SEQ ID NO: 73 - protein, 904 aa, Camponotus floridanus
  nan-Cflo
MGNTESNVTSGVKKQTDTSSIVLYKLVDLKGGGLLVDMMKRATQTKQFAELDHAMRTKVEPFLYNKGEGKWIPIDKLVLLRNKDRPRHKMLAPLKAMENPADYDIDKDMGDEEVDETKIDKSKYRLVCWNLSERGAVGETILHLCMLNATALHADLAKRLLRFYPKLINDIYLCDEYYGENVLHIAIVNEDPSMVKYLLDSGADDPRIIHERCFGNFMCPEDQKASRFDSQDHEWVCVTPETNYNGYVYWGEYPLSFAACLGQEECYRLILARGADPDKQDTNGNTVLHMLATFDMAYEVGASLDIRNVQHLTPLTLAAKLARIEMFFHILNIEREIYWQIGSITCAAYPLSQIDTIDVNAGTINNNSALNLVVFGEKDEHLELMDGVLIDLLNAKWNTFVKFRFYRQFILFYFYFVLSLISFTLRPGPQTDENANDTLTNSFNTTRESMILKSLHSSDLSELVTNSFTAAFTSNFKSSLNVTQESLEKIQLQVTSNVTSALRSILLLTLSNNEDLLSSPDEAAIHTLWYTDNPQNASDYFINMYNKTVTIDTNSTAKTTIDDVTLLGKFNNHEKWWDDLTEECRLMQLTTMSAKIRLTAEIVMYFAAVLYILAALREARFLGLNMFIENLMTAPSRVMFLFSCCILMSFPVLRLSCSDEVEDVLAVVVMLTTAPYFLFFCRGFKTVGPFVVMIYRMITGDLLRFVSIYLVFVMGFSQAYYIIFLSFDNPNTPEGVDDSITNPMPSPMESVMAMFLMSMTNFGDYYATFDRTEHEFEAKLLFVLYMAIVAILLVNMLIAMMGNTYQKIAETRNEWQRQWARIVLVVERGVSPAERLKKLMDYSQPMSDGRKALVLRLNQTEEDKEEMKEILEMKRTHDKLIKKRQDKILKEKALAETEAVITRK

SEQ ID NO: 74 - protein, 905 aa, Harpegnathos saltator
  nan-Hsal
MGNTESNVTSGVKKQTDTSSIMLYKLVDLKGGGLFVDMMKRAAQTKQFAELDHAVRTKVEPYLYNKGKGKWIPVDKLVLLRNKDRPRHKMLAPLKAMENPADYDIDKDMGDEDVDETKIDKSKYRLVCWSLSERGAVGETILHLCMLNATALHADLAKRLLRFYPNLINDIYISDEYYGENVLHIAIVNEDPAMVKYLLDSGADVHERCFGNFMCPEDQKASRVDSLDHEWVCVAPETNYSGYVYWGEYPLSFAACLGQEECYRLMLARGADPDKQDTNGNTVLHMLVIYEKLTTFDMAYEVGASLAIRNVQHLTPLTLSAKLAKIEMFFHILNIEREIYWQIGSITCAAYPLSQIDTIDINIGTINKNSALNLVVFGEKDEHLELMDGMLVDLLNAKWNTFVKSRFYRQFFLFCFYFVLSLISFTLRPGPLPQETENANDTRTNSSNATAMEILRLFQSSDLSNLVTNSLAAAFASNLKSSLNVTQESLEKIQLQVTSNITSALKNILPSLSDNEGILSAPDEAAIRTLWYTSSPYNESDYLTDAYNENVTSDANSTAGTIIGSIEVSKSNDKDNWWEDLTEECRLMQLTTISAKIRLTAEVLMEIAAVLYILAALREARFLGLNMFVENLMTAPSRVMFLFSCCILLSFPFLRLACADEVEDMLAVVVMLTTAPYFLFFCRGFKTVGPFVVMIYRMIMGDLLRFVSIYLVFVMGFSQAYYIIFLSFDNPNTPEGVDDSVSNPMPSPMESIMAMFLMSMTNFGDYYGAFERTEHESEAKLLFVLYMAIVAILLVNMLIAMMGNTYQKIAETRNEWQRQWARIVLVVERGVSPAERLKKLMDYSQPMSGGRRALVLRLNQSEEDKEEMKEILEMKRTHDRLLKKRQGRMSKEKVLAESEIIITRN

SEQ ID NO: 75 - protein, 912 aa, Apis florea
  nan-Aflo
  misc_feature (414)..(414): Xaa can be any proteinogenic amino acid
MGNTESNVASGVKKQTDASSILLYKLVDLKGGGLLVDMMKRATQTKQYAELDHALRTKVEPYLYNKGKGKWIPIEKLVLLRNKDRPKHKMLPPLRAMENPADYDIDKDTGEDEVRDETRIDKSKYRLVCWSLSERGAVGETILHLCMLHATAIHIDLAKRLLRFYPKLINDVYISDEYYGESALHIAIVNEDPSMVKFLLDSGADVHERCIGNFMCPEDQKASRADSLDHEWVCVTPETNYNGYVYWGEYPLNFAACLGQEECYRLILARGADPDKQDTNGNTVLHMLVIYEKLATFDMAYEVGASLAIRNAQHLTPLTLSAKLAKIEMFFHILNIEREIYWQIGSITCAAYPLSQVDTIDVDTGSISHNSALNLVVFGEKDEHLELMDGILVDLLNAKWNTFVKFRFYRQFFXFCFYFVLSLISFTLRPGPATTSSVPNPVAQTPLTSTELSTISPKVDPPVSNVTVNRSSNAFQHDSNLSLLLDKILSTASVKYPWNVTRTRLDKLKLDIIENLTTALNNLLSTHRDEIEFFNHSYKTTEYFHSTRNDTTPIDNLKITINETVLSVNSTILFNDGISFATGKYNWWNNLTEECRLMHVDTLSTKIRLTAEVLMEIAATLYIFAALREARFLGLNMFIENLMTAPSRVMFLFSCCILLTFPFLRLICADQVEDMLAVVVMLTTAPYFLFFCRGFKTVGPFVVMIYRMIMGDLLRFVSIYLVFVMGFSQAYYIIFLSFDNPNTPEGVDDSMSNPMPSPIESIMAMFLMSMTNFGDYYGAFERTQHEIEAKFLFVVYMAIVAILLVNMLIAMMGNTYQKIAETRNEWQRQWARIVLVVERGVSPEERLKKLMDYSQPMSDGRRALVLRLNQSEEDKEEMKEILEMKRTHDKLYKKRQSKIMKKILTSEDNVIL

SEQ ID NO: 76 - protein, 887 aa, Apis mellifera
  nan-Amel
MGNTESNVASGVKKQTDASSILLYKLVDLKGGGLLVDMMKRATQTKQYAELDHALRTKVEPYLYNKGKGKWIPIEKLVLLRNKDRPKHKMLPPLRAMENPADYDIDKDMGEDEVDETKIDKSKYRLVCWSLSERGAVGETILHLCMLHATAIHIDLAKRLLRFYPKLINDVYISDEYYGESALHIAIVNEDPSMVKFLLDSGADVHERCIGNFMCPEDQKASRADSLDHEWVCVTPETNYNGYVYWGEYPLNFAACLGQEECYRLILARGADPDKQDTNGNTVLHMLVIYEKLATFDMAYEVGASLAIRNAQHLTPLTLSAKLAKIEMFFHILNIEREIYWQIGSITCAAYPLSQVDTIDVDTGSISHNSALNLVVFGEKDEHLELMDGILVDLLNAKWNTFVKFRFYRQFFLFCFYFVLSLISFTLRPGPATTSSVSNPQITSTELPTIPPKMDPPVHNSDLPLLLDKILSTALVSKRYPWNLTRTRLDKLKLDIVENLTSALSDMLGTYRNEIKLFNRSDKTSIYSSRNDAKPIDETVLRINSTILFNGDGISFTSKYNWWNNLTEECRLMHLDTLSTKIRLTAEVLMEIAATLYIFAALREARFLGLNMFIENLMTAPSRVMFLFSCCILLTFPFLRLICADEIEDMLAVVVMLTTAPYFLFFCRGFKTVGPFVVMIYRMIMGDLLRFVSIYLVFVMGFSQAYYIIFLSFDNPNTPEGVDDSMSNPMPSPIESIMAMFLMSMTNFGDYYGAFERTQHEMEAKFLFVVYMAIVAILLVNMLIAMMGNTYQKIAETRNEWQRQWARIVLVVERGVSPDERLKKLMDYSQPMSDGRRALVLRLNQSEEDKEEMKEILEMKRTHDKLYKRRQSKTMKKILTSEDNVIL

SEQ ID NO: 77 - protein, 903 aa, Megachile rotundata
  nan-Mrot
MGNTESNVTSGVKKQTDSSSILLYKLVDLKGGGLLVDMMKRATQTKQYAELDHALRTKVEPYLYNKGKGKWIPIEKLVLLRNKDRPKHKMLPPLRAMENPADYDIDKDMGEEEVDETKIDKSKYRLVCWSLSQRGAVGETIMHLCMLHATAIHTDLAKRLLRFYPKLINDIYISDEYYGENALHIAIVNEDPAMVKFLLDSGADVHERCVGNFMCPEDQKASRTDSVDHEWVCVAPETNYSGYVYWGEYPLNFAACLGQEECYRLILARGADPDKQDTNGNTVLHMLVIYEKMATFDMAYEVGASLSIRNAQHLTPLTLSAKLARIEMFFHILNIEREIYWQIGSITCAAYPLSQVDTIDVNTGSISHTSALNLVVFGEKDEHLELMDGTMVDLLNAKWNTFVKSRFYRQFFLFCFYFILYLISFTLRPGPSVTSTATTAPTTESTTPKLPDPPPNFIPVTNQKTFLEASLSSSLDEIVTNALNLNFPSNATARFDDLKLDLVTHIMSNLKNILNGNETKNEPFNSSQLARFDKHLFRENDTDYSTSILNETADVDSTTKFSFDNSVLFEADNKSDWWTDLTTECRLMQLTTASAKIRLIAEIFMEIAAILYILAALREARFLGLNMFIENLMTVPSRVMFLFSCCILLSFPFLRLSCADEVEDVLAVVVMLTTAPYFLFFCRGFKTVGPFVVMIYRMIMGDLLRFVSIYLVFVIGFSQAYYIIFLSFDNPNTPEGVDDSVSNPMPSPIESIMAMFLMSMTNFGDYYGAFERTRHEMEAKFLFVVYMAIVAILLVNMLIAMMGNTYQKIAETRNEWQRQWARIVLVVERGVSPQERLKKLMDYSQPMSDGRRALVLRLNQSEEDKEEMKEILEMKRTHERLYKKRQLKTTKEKTTITEENVTL

SEQ ID NO: 78 - protein, 903 aa, Nasonia vitripennis
  nan-Nvit
MGNAESNVTSGVKKQTDAGAIALYKLVDLKGGGLLVDMMKRASQTKQYAEIDHAIRTKVEPFLYNGGKGKWIPIAKLVLLRNKERGRHKMLPVLKAMEKPEDYDIDKDMANDPEPDENTIDKSKYKLVCWTLSDRGAVGETILHLCMLNATQLHADLAKRLLRFYPNLINDIYIDDEYYGENVLHIAIVNEDPSMVKFLLDSGANVNERCCGNFMCPEDQKASRNDSVEHEWVCVCSETNYDGYVYWGEYPLSFAACLDQEECYRLILAKGADPDSQDTNGNTVLHMLVIYEKLETFDMAYEVGSSLSIRNVLQLTPLTLAAKLARVEMFFHILNIEREIYWQIGSITCAAYPLSQIDTIDVDTGKISNNSALNLVVFGDKEEHLKLLEGVLIDLLNAKWNTFVKSRFYQQFYLFFCYFILSLISCTLRPGPITKTDAPTTTPHPMNDTSIESITPTSEPLELQTLSSLLAKNLAEQLVMGMKMYGNVSEDSLARISLQVASNISGSIKDIWTRQNLTSNDTDYVDIAGGLYADVNETSASDPFDLNASDIVILKKGKKELDDWWDDLTEDCRLMQMNSTSAKIRLTAEIFMEFGAILYICAALREARFLGLNMFIENLMTAPSRVMFLFSCCILLSFPFLRMSCADEVEDILAVVVMLTTAPYFLFFCRGFKTVGPFVVMIYRMIMGDLLRFVSIYLVFVMGFSQAYYIIFLSFDNPITPEGVDDSKANPLPSAMESIMAMFLMSMTNFGDYYDAFENTEHEMLAKCLFVVYMAIVSVLLVNMLIAMMGNTYQKIAETRNEWQRQWARIVLVVERGVAPAERLKKLNVYSQPMSDGRKALVLRLNQTDKDKEEMKDILEMKRIHIKSIKRRKDKLQKAKEDAEKLQQQMADKDNKDKAVIIQ

SEQ ID NO: 79 - protein, 808 aa, Dendroctonus ponderosae
  nan-Dpon
MGNTESNVTSGVKKQAGAAMQPIYKLCDLKGGGLLVELMKRAAQNKQYAEIDHAIKTKVEHFLYNKGAGRYIPISQMVLLRNKERGKHKLLPQLRGMENPEDFEVDDEGPEITEEEYNKDPSLYRHVCWKLRERGAVGETILHLCLLNATSLHADIAKRLLRFYPKLINDIYISDEYYGENVLHIAIVNEDPSMVKFLLAANVNFQERCFGNFMCPEDQKSSRTDSLDHEWVNVYHETNYDGYVYWGEYPLSFAACLGQEESFRLILAKGANLDAQDTNGNTVLHLLVIYSKVEAFDMAYELGAHLSIRNILKMTPLTLAAKLARMDIFFHILKLEREIYWQIGSITCAAYPLSQIDTIDVKTGQISKMSALNLVVFGDKDEHLELLDGVLVDLLNAKWNTFVKSKFYRQFFTFAFYFTVSLVAFTLRPGPPIHTDSPKNSTNTTKQLKIPNATIQSIIMNNSNDDYDVEEWWDNLREECRLMNLDTTESLVRFTAELGITFGAFLYLAAAVREARFLGLRMFFENLMTAPSRVMFLFSCILVFGVIPSLRLVCMDEVEDIIAVVVMLTTAPYFLFFCRGFKTVGPFVVMIYRMVLGDLLRFATIYMVFVMGFSQAYYIIFLSFDNPLTPEDVDDSATNPMSTPSESIMAMFLMSMTNFGDYYTAFARTEHEYEAKILFVIFMAIVAILLINMLIAMMGNTYQKIAETRNEWQRQWARIVLVVERGVSPPERLKQLNVYSQPMSDGKRALVLRLNQSEEDKEEMKDILEIKRRHDRHNKIRKDKLAGINTDHTPTIKVETKPANTFMI

SEQ ID NO: 80 - protein, 794 aa, Tribolium castaneum
  nan-Tcas
MGNTESNVTSGVKKQAGASVQPIYKLCDLKGGGLLVELMKRATQNKQYAELDHAIKTKVEHFLYNKGAGRYFTISDLVLLRNKERSRQKWLPQLKAMENPEDFEIDDEGPEITEEQYQKNPHLYRHVCWKIKERGAVGESIMHLCLLNATSLHADIAKRLLRFYPKLINDIYMSDEYYGENVLHIAIVNEDPSMVKFLLDSGVNIQERCCGNFMCPEDQKSSRYDSLDHEWVNVCPVTNYEGYVYWGEYPLTFAACLGQEESFRLMLSRGADPDAQDTNGNTVLHLLVILQKLEAFDMAYEVGAKLSIRNVLSLTPLTLAAKLARIDMFFHILNLEREIYWQIGSITCAAYPLSQIDTIDIETGQISKTSALNLVVFGDKDEHLELMDGVLIDLLNAKWNTFVKFKFYKQFFTFAFYFLISLVAFTLRPGPPHKEAKLVNVTINATVSNTSKWENLTSIPFGKTPDDDDSDMEEWWDNLQEECRLMQLESPESKIRLTAEVLMVVGAFAYLAAAVREARFLGGRMFFENLMTAPSRVMFLFSCILMLTVPCLRLACLDEFEDIVAVVIMLTTAPYFLFFCRGFKTVGPFVVMIYRMVMGDLIRFASIYLVFVMGFSQAFYIIFLSFDNPLTPDDVDDSATNPISTPIESIMAMFLMSMTNFGDYYAAFEKTDHEYEAKMLFVVFMVIVSILLINMLIAMMGNTYQKIAETRNEWQRQWARIVLVVERGVSPSERLKQLMVYSQPMSDGRRALVLRLNQSDEDKEEMKEILEMRRRHERHIKKRSEKLKENAKKN

SEQ ID NO: 81 - protein, 917 aa, Nilaparvata lugens
  nan-Nlug
MGNTESNVTSGVKKQTDTSSITMYKLVDLKGGGLLVELMKRATQNKQYAELDHAIKTKVEPFLYNKGNGRLISIAKLVLLRNKDRPRTKMLPPLKNMENPDDFDVIGSNIPGIPEPKETDDPSTYRDVCWDLNERGAVGETILHLCLLNATSVHADLAKRLLKFYPKLINDIYMCDEYYGESVLHIAIVNEDPGMVKFLLNSGADFHERCFGNFMCPEDQKASRSDSFDHEWVNLWPVTNYEGYVYWGEYPLSFAACLGQEECYRLMLARGANPDNQDTNGNTVLHMLVIYEKMGTFDTAYELGANVSVRNIQNLTPLTLAAKLARIEMFFHIMNIEREIYWQIGSITCAAYPLMLIDTIDIETGNISKDSALNLVVFGDKDEHLDLMEGVLVDLLHAKWNAFVKFRFYRQFIMFFQYFLISCVCFILRPGPPEAHDGMNITANATLNLSFGVLEVRPEALQALLYRLEKLSLPQSGDLERFILESLADEKSISEAALENDENREPGWNNSVFSTYETLARDTGYQTDESPHDGLSSSMDYAEVAERLTKLMIDVNLTERSGAVNEIILKALPSLEEKEDGLEEWWSGIAGDCILLQVNDLYDLARLCAEVALEIGAFLYLLAALREARFLGLKMMIENLMTAPSRVMFLFSCCLMMTMPFFRFTCQDETEDILAVVIMLTTGPYFLFFCRGFKTVGPFVVMIYRMVMGDLLRFASIYLVFVMGFSQAYYIIFLTYDNPTTPEGTDDTTSNPLPSPIEAIMAMFFMSLTNFGDYYSAFENTEHEIEAKAFFVIYMVIVAILLINMLIAMMGNTYQKIAETKNEWQRQWARIVLVVERGVSPKERLKKLMSYSQPMSDGRRALVLRLNMTEEDKEEMKEILEMKRVHDKIVMKRKKGLKLLGTTTPSPKRMKGRETPI

SEQ ID NO: 82 - protein, 900 aa, Acyrthosiphon pisum
  nan-Apis
MGNTESNVASGVKKQVDTSSLQIYNLVDLKGCGLLVDLMKKAVQTKNFTELDNAIKTQVEPMLYNKGEGRMIPIAKLVLLRNRDRSRARWLPPLKNMEDTNDYDIEKDIPTIEELEKLGEVQYREVCWDLKERGTVGETALHLCLLNATSIHADLAKRLLHFYPKLVNDIYMIDEYYGESVLHMAIVNEDPAMVKVLMDSGANLNERCFGNFMSTEDQKASRSDSLDHEWVNLCPDTNYEGYVYWGEYPLSFAACLGQEESYRLMLARGADPNNQDTNGNTVLHMLVIYEKISTFDMAYEIGAELNIRNVQNLTPLTLAAKLARIQMFFHILKIEREIYWQIGSITCAAYPLTQIDTIDNDTGQISRNSALNLVVFGESPEHLEMMDGVLVDLLNAKWNAFVKFRFYRQFILFAFYFSISMVCFVLRPGPPPTGLKPPLINYTSTSTTVATTPFDFMDNESMLPDMYDEMMIGGGGPTEFETVQVTTEMATTSDNATTTNNGSGIGTPLIYEDGGGGGGGGGTVSLHGKSSGSDRGKHRSTWSPANHTFKTNYTYNYNKSRKFWWNKRQKVCRLMAVHSTDDLIRMGSEVGMFMGAFLYLLAAVREAGFLGTQMFIENLAIAPARVMFLFSCLLMMTIPPLRLTCYDKAEDIIAVIIMLTTCPYFLFFCRGFKTVGPFVVMIYRMVMGDLLRFVSIYMVFVMGFSQAYYVIFLSYDNPLTPEGIDDSVLNPMPTPTESIMAMFLMSVNTFTDYYTAFDKTSHTLVAKFCFIVFMVIVAILLVNMLIAMMGNTYQKIAETRNEWQRQWARIVLVVERGVSPSQRLIKLMYYSQPMSDGRRALVLRLNQTDEDKEQMKEILEMKRIHNRYVERMRARDLSSKLSSSCGKNANNGTFNLKANE

SEQ ID NO: 83 - protein, 902 aa, Myzus persicae
  nan-Mper
MGNTESNVASGVKKQVDTSSLQIYNLVDLKGCGLLVDLMKKAVQTKNFAELDNAIKTQVEPMLYNKGEGRMIPIAKLVLLRNRDRSRARWLPPLKNMEDANEYDIEKDIPTIEELEKLGEVQYREVCWDLKERGTVGETALHLCLLNATSIHADLAKRLLHFYPKLVNDIYMIDEYYGESVLHMAIVNEDPAMVKVLMDSGADLNERCFGNFMSTEDQKASRSDSLDHEWVNLCPDTNYEGYVYWGEYPLSFAACLGQEESYRLMLARGADPNNQDTNGNTVLHMLVIYEKISTFDMAYEIGAELNIRNVQNLTPLTLAAKLARIQMFFHILKIEREIYWQIGSITCAAYPLTQIDTIDNDTGQISRNSALNLVVFGESPEHLEMMDGVLVDLLNAKWNAFVKFRFYRQFILFAFYFSISMVCFVLRPGPPPTGLKPPLINYTSTSTTVATTPFDFMDNESMLPDNVMYDEMMIGGGGPTEFETPVVTTEMATVNDNATTNNGTGIIRTPLIYEDGAGGGGGSGTVSLHGKSSGSDRGKHRSTWNPANHTFKTNYTYNYNKSRKFWWNKRQKVCRLMAVHSTDDLIRMGSEVGMFVGAFLYLLAAVREAGFLGSQMFIENLAIAPARVMFLFSCLLMMTIPPLRLTCYDKAEDIIAVIIMLTTCPYFLFFCRGFKTVGPFVVMIYRMVMGDLLRFVSIYMVFVMGFSQAYYVIFLSYDNPLTPEGIDDSVLNPMPTPTESIMAMFLMSVNTFTDYYTAFDKTSHTLVAKFCFIVFMVIVAILLVNMLIAMMGNTYQKIAETRNEWQRQWARIVLVVERGVSPSQRLKKLMYYSQPMSDGRRALVLRLNQTDEDKEQMKEILEMKRIHNRYVERMRARDLSSKLSSSCGKNANNGTINLKANK

SEQ ID NO: 84 - protein, 1202 aa, Bemisia tabaci
  nan-Btab
MGNAESNVTSGVKKQADTSSILMYKLVDLKGGGLLVELMKRAARTKQFAELDHAIKTKVEPFLYNKGEGRLIPISHLVLIRNKERPRHKWLPYLKHMDMDTELDIEKMPIDNDPEKIDPKKCREVCWDLMERGAVGETILHLCLLNATSIHADLAKRLLRFYPKLINDIYMCDEYYGESVLHIAIVNEDPAMVKFLLDSGADYHERCTGNFMCPEDQKATRQDTVEHEWVNLSPLTNYEGYVYWGEYPLSFAACLGQEECFRLMLARGANPDNQDTNGNTVLHMLVIYEKLETFDMAYEVGANISVRNVQNLTPLTLAAKLARIEMFFHILNIEREIYWQIGSIACAAYPLGQIDTIDIETGHISKNSALNLVVFGDKDEHLELMDGVLVDLLNAKWNAFVKLRFYRQFFQFLIYFLVSLVCFTLRPGPLPNGDPPASPPTGAPTNTSMFPKENTTDYVPQVVAAFRAVIGDPHAYKRRKRQALNGDSRVTSVEPEAPEMTANNGKVASDNNTNESLANSSTGDRVSRRYLMIDEQNNSNLDGLSSVKFLSELSRNDEHISISGLRYPAWPTSEKPSDESRPAVFPESSKVGFTSSLKPENGKLQEISVNTMTLPSFGKRNSYSNKSSIARALNISMEANKSLGKSATSRTSTEAPFKSNVQIFKKIDAPSMNVMLSYKSARKNDSRIVDDPNFQHVNTSQVASVSPVSVERTMHSVSRTLLTAEMRNPEMRLRTPETVLIARFRGGGRKRYRNQTRQTAEAGSATEEPGSEDEAGNERRYFRPGEADGSGNRSEAEDAASFVNCTEAEKCLERSINDNEISNGNGNGNAVDNQVEKDGSGEEEDEEEEEWWEDTGECRLWRVNTYEDVIRLTAEVALEFGALLYLLAALREASFLGLHMFIENLMTVPSRVMFLFSCLMMMGAPILRFSCEDEAEDILAVMIMLLTSPYFLFFCRGFKTVGPFVVMIYRMVMGDLLRFVSIYMVFVMGFSQAYYIIFLSFDNPSTPDGVDDTVSNPMPNPVEAGMAMFLMSLNTFGDYFSAFEKTEHELEAKVCFVIFMGIVAILLVNMLIAMMGNTYQKIAETRNEWQRQWARIVLVVERGVPPKERLTKLMWYSQPMSDGRRALVLRLNQTEQDKEEMKEILEMKRVHNRIVEKRQKRLAKLSNNASPSNKPLVDLPNLSNHDSPTKPLLDLASNLSKF

SEQ ID NO: 85 - protein, 907 aa, Halyomorpha halys
  nan-Hhal
MGNTESNVTSGVKKQADTSSIKIYKLVDLKGGGLLVELMKRAAQTKQYAELDHAIKTKVEPFLYNKGQGKMMPVSQLVLMRNKERPRHKMLPPLRNLENPDDYDIESYVVPEPTEEDLKDPNKYREVCWDLKERGAVGETILHLCLLNATSLHADLAKRLLRFYPKLINDVYMSDEYYGESVLHIAIVNEDPAMVKFLLDSGVNVNERCFGNFMCPEDQKASRTDSFDHEWVNLQSFTTYEGYVYWGEYPLSFAACLGQEECYRLMLARGANPDNQDTNGNTVLHMLVIYSKIQTFDMAYEVGGDLSIRNVQYLTPLTLAAKLARIELFFHILNIEREIYWQIGSITCAAYPLSQIDTIDIVTGNISKNSALNLVVFGEKDEHLELMDGVLIDLLNAKWNAFVKFRFYRQFFLFLFYFLISLICFTLRPGPPPVKPISSINSTKPNGNNITADLSPENLTTLPKWIYKTEIKKYDPEDNTSQNSRLNVILREVILTSLKVEDIDKVVSFSNAETPDNSREDAEGLVCNGNSIHSCIGNGSDVISVFGKGKSPKVPKPGASADDFDYDDTWWEEFGQCRLLQVTSYIEMTRLISEVMLDIGALLYILAALREARFLGWSMFVENLMTAPSRVMFLFSCCLMLTMPFLRFTCNEEIEDMMAVIIMLTTAPYFLFFCRGFKTVGPFVVMIYRMIMGDLLRFATIYLVFVMGFAQAYYIIFLSFDNPLTPEGVDDSVSNPIPNPMEAVMAMFFMSMTSFGDYYPALERTAHEFCAKLCFVIYMAIVAILLVNMLIAMMGNTYQKIAETRNEWQRQWARIVLVVERGVSPSERLTKLMWYSQPMSDGRRALVLRLNQSEEDKEEMKEILEMKRIHNRMVQKRKEREMSTTKSPNLINLNSPIENTKNKNPFS

SEQ ID NO: 86 - protein, 748 aa, Euschistus heros
  nan-Eher_partial
  misc_feature (102)..(102): Xaa can be any proteinogenic amino acid
LRFYPKLINDVYMSDEYYGESVLHIAIVNEDPAMVKFLLDSGVNVNERCFGNFMCPEDQKASRTDSLDHEWVNLQSFTTYEGYVYWGEYPLSFAACLGQEEXYRLMLARGANPDNQDTNGNTVLHMLVIYCKIQTFDMAYEVGGDLSIRNVQYLTPLTLAAKLARIELFFHILNIEREIYWQIGSITCAAYPLSQIDTIDIVTGNISKNSALNLVVFGEKDEHLELMDGVLIDLLNAKWNAFVKFRFYRQFFLFLFYFLISLICFTLRPGPPPVKPISSFNSTKPSGNNITAELSPESNATTVPKWIYKTEIKKYDPEDNSSQNSRLNVILREVILTSLKVEDIDKVVSFSNAEPQDNSREDADGLVCNGDSVHSCLGNGSDVVAVFGKGKSPKVPKPGASADDFDYDDTWWEEFGQCRLLQVTSYIEMTRLISEVLLDIGALLYILAALREARFLGWSMFVENLMTAPSRVMFLFSCCLMLTMPFLRFTCNEEIEDMMAVIIMLTTAPYFLFFCRGFKTVGPFVVMIYRMIMGDLLRFATIYLVFVMGFAQAYYIIFLSFDNPLTPEGVDDSVSNPIPNPMEAVMAMFFMSMTSFGDYYPALERTAHEFCAKLCFVIYMAIVAILLVNMLIAMMGNTYQKIAETRNEWQRQWARIVLVVERGVSPSERLTKLMWYSQPMSDGRRALVLRLNQSEEDKEEMKEILEMKRIHNRMVQKRKEREKSMNKSPNLINLNSPAENVKNTNPFS

SEQ ID NO: 87 - protein, 823 aa, Pediculus humanus
  nan-Phum
MGNTESNVTSGVKKQAGTSEQPLYKLVGLKGGGLLVDMMKRATQTKQYAELDHAIKTKIEPFLYNKGKGRLIPISQLVLLRNCERSRTKLLPLLKNMEDPESEFDMDRDGNPGDFQPAPDGVQEDFHDYNKKYRDVCWDLKKRGAVGETCLHLCMLNATSIHADLAKRLLKFYPKLINDIYMSDEYYGESVLHVAIVNEDPAMVKYLLDSGSNFHERCFGNFMCPEDQKATRTDSLDHEYVNLSTETNYEGYVYWGEYPLSFAACLGQEESYRLMLAKGANPDNQDTNGNTVLHMLVIHNKLPMFDVAYEVGANLSLKNAKCLTPLTLAAKLARVELFFHILNIEREIYWQIGSITCAAYPLSQIDTIDIETGNISKNSALNLVVFGEKDEHLELMDGVLVDLLVAKWNTYVKFRFYRQFISFFFYFLISVICFTLRPGPPTGTTTTTNGIVVLNNNNNNITSVVDNSNNVTTTTATTTATSYSFPGHVIVTLLSYDKYEDKIRIISELAMEIGSVLYLLGALREAKFLGIHMFIENLMTAPSRVLFLGSCCIMQFVPWLRITCKEETEDIVAVIIMLTTAPYFLFFCRKMNDPVFLFLFFLIKKIFFLIFFFFFFTKPTYYIIFLSFDNPKTPDGVDDSGTNPMQSPVESIMAMFLMSLTNFGEYYGAFEKTEHEFVAKLMFVVYMAIVAILLVNMLIAMMGNTYQKIAETRNEWQRQWARIVLVVERGVSPQERLKKLMLYSQPMSDGRRALVLRLHQTPEDKEEMKEILDMKRIHNRTVQRRKAKENKNVTFAGTPKNGIKNRLLGPVPPLKSIPSKPKI

SEQ ID NO: 88 - protein, 851 aa, Bombyx mori
  nan-Bmor
MGNTESNVTSGVKKQAGTSEQKLYKLVDIKGGGLLVDMMKRALQNKQYAEIDHAIKTKVEPFLYNRGRGRYIPISHLVLLRNKERPRHKLLPPLRGMENPDEEFDVDKDWPVVTQEEYDANPSGYRELCWDVKERGAVGETILHLCLLNATSLLAHLAKRLLRFYPKMINDIYISDEYYGETVLHITIVNEDPTMAKFLLDAGADYHERCYGNFMCPEDQKASRTDSFDHEWVNVQPDTNYNGYVYWGEYPLSFAACLGQEECYRLILARGADPDKQDTNGNTVLHMLVIYEKMSTFDMAYEVGASLNIRNVQNLTPLTLAAKLARTEMFFHILNIEREIYWQIGATTCAAYPLGQVDTIDTETGLISKDSALNLVVFGEKDEHLGLLEGMLIDLLKTKWNTFVKFRFYRQFILFSCYFLVSLICFTLRPGPPDRALNTTVLNSTIGPNVTDAELVSDVEANRSVFGFPENCTMTPNADFDTNAVEVLNGTKFGGSHCARFKSHPKEKSTEAPRENDVEGWWEDLTEECRLMNLDTWQAKLRISAELLLWMGALAYFGAALREAKFLGIKMFIENLSTVPSRVMFLFSCLLMLILPTLRLWCADEAEDHLAVMIMLTTAPYFLFFCRGFKTVGPFVVMIYRMVMGDLLRFVCIYLVFVMGFSQAYYVIFLSFDNPNTPEGVDDSVSNPMPSPMESIMAMFLMSLTSFSDYYTAFDRTDHEIEAKLLFVIYMIIVAILLVNMLIAMMGNTYQKIAETRNEWQRQWARIVLVVERGVPPAQRLKQLMTYSQPMANGKRALVLRINQKDEDKEEMKEILEMKRTHERIVAKRKQREALKPGEIPPPARDYPIRK

SEQ ID NO: 89 - protein, 854 aa, Vanessa tameamea
  nan-Vtam
MGNTESNVTSGVKKQAGTSEQKIYKLIDIKGGGLLVDMMKRAVQNKQYAEIDHAIKTKVEPFLYNKGKGRYIPISHIVLLRNKERPRHKLLPPLRGMENPDEEFDVEKDWPVVTQEEYDVNPSGYRELCWDLKERGAVGETILHLCLLNATSLLADLAKRLLRFYPKLINDIYMSDEYYGESVLHMTIVNEDPTMVKFLLDAGADYHERCFGNFMCPEDQKASRTDSFDHEWVNVQPETNYDGYVYWGEYPLSFAACLGQEECYRLILARGANPDKQDTNGNTVLHMLIIYDKISTFDMAYEVGASLNIRNVQNLTPLTLTAKLARVELFFHILNIEREIYWQIGATTCAAYPLGQVDTIDTETGLISKDSALNLVVFGEKDEHLELLEGMLIDLLKTKWNTFVKFRFYRQFILFSFYFVISLVCFTLRPGPPDRALNATAVNTTTGPVNDTELVSDVENCTLPQAGIEFDPGTVEVFNGSKPGVQCARFKSHPKDKEKPTAPRENDMEGWWEDLTEECRLMNFDTWHAKLRISAELILWVGALAYIAAALREARFLGIKMFIENLSTVPSRVMFLFSCLLMVCLPTLRLWCADEEEDHLAVIIMLTTAPYFLFFCRGFKTVGPFVVMIYRMVMGDLLRFVCIYLVFVMGFSQAYYVIFLSFDNPNTPEGVDDSVSNPMPSPMESIMAMFLMSLTSFSDYYGAFDRTDHEIAAKLLFVIYMIIVAILLVNMLIAMMGNTYQKIAETRNEWQRQWARIVLVVERGVPPAQRLKQLLAYSQPMANGKRALVLRINQKDEDKEEMKEILEMKRTHERVVAKRKQREAEMKGGKGRLPPPPVRDYPTTKNQKVAIKKM

SEQ ID NO: 90 - protein, 349 aa, Danaus plexippus
  nan-Dple-partial
GGGLLVDMMKRAVQNKQYAEIDHAIKTKVEPFLYNKGKGRHIPISHLVLLRNKERGRHKLLPPLRGMENPDEEFDVEKDWPVVTQEEYEANPSAYRELCWDLKERGAVGETILHLCLLNATSLLADLAKRLLRFYPKLINDIYMSDEYYGESVLHMTIVNEDPTMVKFLLDSGADYHERCFGNFMCPEDQKASRTDSFDHEWVNVQPDTNYDGYVYWGEYPLSFAACLGQEECYRLILARGANPDKQDTNGNTVLHMLIIYDKISTFDMAYEVGASLNIRNVQNLTPLTLAAKLARVELFFHILNIEREIYWQIGATTCAAYPLGQVDTIDTETGRISKDSALNLVVFG

SEQ ID NO: 91 - protein, 939 aa, Acromyrmex echinatior
  wtrw-Aech
MEETEERVPKTVPNMLTRTNTASLFLTRLKAKRSSSKQDELESGRVQYEPSLPDDSISPSMEDYFIISEHTTSDEIDRTSLRINEDLIKNILTEHKRHMGYKSQILENLESGKMDEININTIFADIKSNEIDILLLQASFLGRMNLIHHLCKCGANINYTEPNHGLTPLHLCAFRNCLDGVKYLIEQGASIDTKSKHTAFHYAAFGDAFDVAQYFMQRDISQLSPYEAEETVLHVASRTDALRVLSLLAPNNKELNRLDQDGYAAIHHAANGGDKVCLDILLKAGCQVDLLTRKNDTALHLAAEVGCVSNLTLLVKANANLQLKNHRGYTALHLAARSHSLECVEILLKGRADPNVEDNEGRTSLHLALGKSLMTDDITELLLKWRANVNKADMYGYTPLHIAASNELSRCVNLLIKHEADLSARTIGGNSALSIVLRKTPTSLDVFERRLDKSLTLSRQGFIAGKLELQLDFRPLLQHRRNRSSETGYLNTFVKEGYKEILEHPLCQSFLHLKWHKIRKYYIARLLFYLIYVLILTSWVIAALAHNCYNESKGYYMHNKPLCSSATGIYGFFYRHPTLLEIHWYALMMLTILEACRKFAVISSYRSVRQFFTQVENLVDWCVILSVFATSFVYTGKTYVWQRHLGAFAVLCGWSNLMLMIGQLPVFGAYVAMFTSVQAQVFKLLLAYACLLVGFTASFCVIFPYSNSFSSPHIGLIKVLAMMTGDLGFDSYLISSDKSGIYENNEGASWILLQISAQLFFVLFLLFVTIVLMNLLIGIAVHDIKGLQKTAGLAKLVRQTKLIHDVEIAIFLGFMPSKRFIKCMRWTTLLLPSPLRAVLTVRPLSPREKRLPRDVLSAAYKIAKERDRQNNYIASRRKIYSAKAGFKGDMTMYRRRDFNEDTLQHNCDKFKDEIAEVKEICEKNHTLLQELIKAHKLNK

SEQ ID NO: 92 - protein, 938 aa, Apis florea
  wtrw-Aflo
MENVTVSIPSTPKRTTMTSLLLTRWLASKSSTRTNAETSWSSDDRSLEYGTPPPIEEPHCYSMCASESSCTEEINCTLQVNKDIIRNLLVEHMRHIGGRLQLLDDLEENKMDLNNLENFAKLYKQHEINALLLHSSFLGHVDAIKSLHECGADLNHSEQGQGLTPLHLCAFSNCLEGVQYLLDNGANIHLERTHTPFHYAAFGNACKVTQYFLQLGISQESCYGEETVLHSAARSDAYNVLKLLAPNNPTLDNLDCNGYAAIHHVADRGDSSCLMILLDAGCKLDLTTKKNDTALHLAAAASCVENVDLLVERGANVHLRNHRDQTALHIAARSHSLECVEILLKKGGCDPNIEDNDGRTSLHLALGRSLLAYDVTEFLITWKANVNKTDKYGYTPLHIAALNELSQCVDILIQHGADLSARTKGGTSALSIILRKTPTSLNVFKQRLDASITLHQHGSATGEAELRLDFHPLLMNQQQGEIRYLGTFVKEGYKEILEHPLCQAFLHLKWQKIRKYYVGRLIFYLFYVLILTGWVMTALAHNCYNESHGQLDNDQPPLCANTTGINGFLYRHPALLEVEWYALMVLTILEVFRKLTSIPTYPSVRQFFTQAENMVEWCVILSVFATSFIYTGRTYPWQSHVGAFAVLCGWSNLMLMIGQLPIFGAYVAMFTSVQAQVFKLLLAYACLLVGFTASFCVIFPRSKSFSSPHIGLIKVLVMMTGELNFEDLFFPREEDGKTIDSGSTSWILLQVSAQLSFVLFLLFVTIVLMNLLVGIAVHDIKGLQKTAGLAKLVRQTKLICDVETALFLGLMPKRLMKFLRWTALLLPSPLRAVLTVRPLNPRESRLPRDLLAAAHKVAKERKNCISGTLYSRKSNTTMYTCLKSEPYSTFRRRFPEEDISTVDDYAIKGELAELKKICERNHQLLQDIVLMLVNDKRE

SEQ ID NO: 93 - protein, 937 aa, Apis mellifera
  wtrw-Amel_1
MENVTVSIPSTPKRTTMTSLLLTRWLTSKSSTRTNPETSWSSDDRSLEYGTPPPIEEPHCYSMCASESSCTEEINCTLQVNKDIIKNLLVEHMRHIGGRLQLLDDLEENKMDLKNTENFAKLYKQHEINALLLHSSFLGHVDAIKSLHKCGADLNHSEQGQGLTPLHLCAFSNCLEGVQYLLDNGANIHLERTHTPFHYAAFGNACKVAQYFLQLGISQESCYGEETVLHSAARSDAYNVLKLLAPNNPTLDNLDCNGYAAIHHVADRGDPSCLTVLLDAGCKLDLTTKKNDTALHLAAAASCVENVDLLVERGANVHLRNHRDQTALHIAARSHSLECVEILLKKGGCDPNIEDSDGRTPLHLALGRSLLAYDVTEFLITWKANVNKTDKYGYTPLHIAALNELSQCVDILIQHGADLSARTKGGTSALSIILRKTPTSLNVFKQRLDASITLHQHGSATGEAELRLDFHPLLMNQQQGEIRYLGTFVKEGYKEILEHPLCQAFLHLKWQKIRKYYVGRLIFYLFYVLILTGWVMTALAHNCYNESHGQLDNGQPPLCANTTGINGFLYRHPALLEVEWYALMVLTILEVFRKLTSIPTYPSVRQFFTQAENMVEWCVILSVFATSFIYTGRTYPWQSHVGAFAVLCGWSNLMLMIGQLPIFGAYVAMFTSVQAQVFKLLLAYACLLVGFTASFCVIFPRSKSFSSPHIGLIKVLVMMTGELNFEDLFFPHEEDGKTIDSGSTSWILLQVSAQLSFVLFLLFVTIVLMNLLVGIAVHDIKGLQKTAGLAKLVRQTKLICDVETALFLGLMPKRLMKFLRWTALLLPSPLRAVLTVRPLNPRESRLPRDLLATAHKVAKERKNCISGTLYNRKRNAVYACLKSEPYLTFRRNFPEEEISTIDDYAIKGELAELKKICERNHQLLQDIVLMLVNDKRE

SEQ ID NO: 94 - protein, 970 aa, Bombus terrestris
  wtrw-Bter
MEMNHSQASSSPPAKKKVQIERIIDMEDVTVSIPNSSKRTTMTSLLLTRWLASKSPHRTEVETNWSSDDQSLEYGTPPPIEEPHCYSMCASESSCTEEINCTLQVNKDIIKNLLVEHMRHIGGRLQLLDDLEENKMDLKNPEHFVKYYKQQEVNALLLHASFLGRIDAIAGLHKCGADLNHSEQGQGLTPLHLSAFSNSLESVQYLLTNGANIHLGRTHTPFHYAAFGNAFKVAQYFLQLGVSQESPCGEETVLHTAARSNAYNVLKLLASNNHTLNNLDCNGYAAIHHVADRGDPAGLLVLLDAGCELDVMTKKGDTALHLAAESSCVENVDLLVEKGANVHLKNHRDQTALHIASRSHSLECVEILLKKGGCDPNIEDSDGRTPLHLALGRSLLAYDVTELLIMWKANINKTDKYGYTPLHIAALNELSQCVDILILHGADLSARTKGGTSALSIILRKTPTSLNVFKQRLDASITLHQHGSATGEAELRLDFHPLLMHQQQGEIRYLGTFVKEGYKEILEHPLCQAFLHLKWQKIRKYYVGRLVFYLFYVLILTGWVMTALAHNCYNESHGQLDNTQPPLCANTTGINGFLYRHPALLEMEWYALMVLTILEAFRKLTSIPTYPSVRQFFTQAENMVEWCVILSVFATSFIYTGRTYAWQSHVGAFAVLCGWSNLMLMIGQLPIFGAYVAMFTSVQAQVFKLLLAYACLLVGFTASFCVIFPRSKSFSSPHIGLIKVLVMMTGELNFEDLFFPREEDGKSIDSGGTSWILLQVSAQLSFVLFLLFVTIVLMNLLVGIAVHDIKGLQKTAGLAKLVRQTKLICDVETALFLGLIPKRLTKLLRWTALLLPSPLRAVLTVRPLNPRESRLPRDLLSAAHKVVKDRKNMSGTLCSRKSNATAYTYLKSEPYSTFRRRSPEEDVSVDDYSVKGDLAELKKICDKNHQLLQDVVMALMNDKRIVNKEKDENN

SEQ ID NO: 95 - protein, 1001 aa, Nasonia vitripennis
  wtrw-Nvit
MAEPSSEEPSPLDKVFPASPNSAVHNNNTTTVNHNNTRNRRVQLERSSSSIQFPASAMALAHKSKTSSNLLTGRCLSSSNCSSTTRRVSLPSTEDPTWVGEDRCMEYGTPPPIEEPHCYSMCLSESSFSEESSCAVQINRDYLKGLLVEHTRTLGCRLLVVEELEAGKLDLASADKYLEGCKKPQELNALLLYASFLGFGELIPIVHNHGADLNHSEPELGMTALHLCAFSNCLSGVRYLLGHNVHVGSKKAHTPYHFAAFGNAIDVAKFFAQLGWSQESPLGEETVLHAAARNNALDVLRLLAPKNPTLNRLDSAGYAAIHYAAERGDSGCLKVLLAAGCLVNVSTRKGETALHLSAEAGCAESLELLLAKGANPAVRNRRGQTALHLAARTHSLECVEALLQHSRSEPNAEDHDGRTPLHVALGRSLLAYDVTEMLISWKAQVNKPDKYGYTPLHVAALNELSQCVDILIQHGADLSAKTKGGTSALSIILRKTPSSLNCFKQRLDASISMHQHGSAAGEVELRLDFHPLLQHQQQGEIGYLGTFVKEGYKEILEHPLCQSFLHLKWQKIRKYYVGRLLFYLLYVLVLTAWVITALAHNCYNESHGQLDNSSRPLCANSTGLNGFLYRHPVVLEVEWYALVVLTVLEGLRKLMGILTYSTVRQFFTQAENMVEWCVIVSVFATSFVYTGRTYTWQSHVGAFAVLCGWSNLMLMIGQLPMFGAYVAMFTSVQAQVFKLLLAYACLLVGFTASFCVIFPRSKSFSSPHTGLIKVLVMMTGELDFEELFFPGEEEGGRPVDVGGTSWILLQVSAQLSFVLFLLFVTIVLMNLLVGIAVHDIKGLQKTAGLAKLVRQTKLICDLETALFLGLLPQCLMKVLRWTALVLPSPLKAVLTVRPLNPREKRLPRDVLAGAYKVARERKGNLLNSTLSSKRSNNSTIYGYQKFDLNASVRRRTNMNEEPATTLEEAARLKEEVAELRKICESNNLLIQELVKSFTFGK

SEQ ID NO: 96 - protein, 880 aa, Cimex lectularius
  wtrw-Clec
MEKVSLDRATSVNLEGRRKKPSFINRWKSFRSKTLPAKEIEFKDAAEEVFSENMEDELSVRICKDTVRQMLLDSMRSSSGDIRIMLEIENGNEPDLSKLTQKELNIFLLWICFIKRDDILLKLCHIYPNINLNFVTDSFGPLHLSSFSGGVKCMELLISRGVDTNVQANNQTALHFATIGGSTEAVKLLLSKNCKIFDTVLHSAVRANSLECLRILLRKGINPNTCDMYGLTPLHIASDRGNLHIMKLLLDSPNVDVNAGTLEKGNTALHFAAEGGNRECVLLLLSKGADLKRKNRKGQVPLHAATRSQSTECVEALLKSGSNICENDNENRTPLHTAVGKALHAYNIVEVLIKWGADVNLRDKYGYTPLHIAAVNELRHCVDLLIMNGADVSARTKGGLTALSIVRRKTPASLVAISRRLDTSISLHDPEQSFREVELKLDFRALLQHSSGGEVGLLKTLIDEGQKNMLDHPLCCAFLHLKWQKIRRFYFSRLLLTSVFVLFLTLYVITTLAHNCYNSAKYNLTSERELCVQNSAVGNMLLNNPVLMEIIWYILVFFTFCEIARKVFGLAGYTSAGQYFEQWANIIEWFNICSVFIISFVYEGRTYVWQNHVGAFAVLCGWTNLMVIIGQLPVFGTYVEMFTKVQKEFAKLFLAYACLLIGFTISFCVIFPTSDAFKNPLIGFVKVLVMMTGELDVDLLLGSEDKDSILLSISAHITFVLFLLFVTVVLMNLLIGIAVHDIQGLSKTAGLSKLVRQTELISFLELSLFQGYLPKQIKNILKWSALMSPAAYRVVLHVKPLNPREKRLPKSIMVEAHEIARKAKNCYAQNCVEEKHNDMAMLNQRMDKIEELLKKQHSILEMILKMEKRMNNEMSNILKD

SEQ ID NO: 97 - protein, 875 aa, Halyomorpha halys
  wtrw-Hhal
MMETANLVRATSVNLDERRKKKSSFINKWKSFRSRTLPMKDIELGETSVDDVISENMEVDLSVKICKEKIRQGFMDCIRASSRDPKILMDVEFRYSVSSEELAKVNPNLMLLWACFTRRDDLLPELVKMGANINFSCPFEGYTPLHLAAFSGCLKSMKWLINEGCHLEIMANNYSPLHFAVLGNNLEAVKILLGAGCKVHNTVLHCSVRTNAVECLPTLLSKQVDANTLDSAGVSPLHIAADTGNINIVRMLLEVENINVDLLSRDRGNTALHYAAEGGHIDVIKVLLIKKASVSIRNKKGQIPLHLGTRSQSADCVEILLKAHSDIGAKDNENRTPLHTAVGKGLLAYSTVEMLIKGGADVNVKDRYGYTALHNAAVNELSNCVDLLIMNGADVSARTKGGLTALSIIRRKTSASLGTIKKKLDSSLSIHYPEQTYREIELKLDFRYLLQHSSGGEVGLLKTLVDEGEKGMLDHPLCCAFLHLKWEKIRRFYFLRLFLSAVFVMLLTLYVMTALAHKCYNTAYNVTITTNQTGDICRKNSIFGKVLLENPFIMEHLWYALSVFTVFEIFRKLFGIAGYSSAGQYFGQLVNVIEWFTIISVFAISFIYTGRTYEWQNHLGAFGVLCGWTNLMVIIGQLPVFGTYVEMFTKVQREFFKLFFAYACLLIGFTISFCVIFPTNKAFEMPLIGFIKVLVMMTGELDMDLLLSDEDNKNLLLNFSAHITFILFLIFVTVVLMNLLVGIAVHDIQGLHKTAGLSKLVRQTDLISFLELSLFQGYLPNQIVEVLKSSALMSPDAYRVVLHVKPLNPRENRLPRNILMAAHEIARQKRPCTSHRSPNDERPYNEQLLQKIDKLEAMLENQKLIMDELLNKLKL

SEQ ID NO: 98 - protein, 891 aa, Nezara viridula
  wtrw-Nvir
  misc_feature (323)..(331): Xaa can be any proteinogenic amino acid
  misc_feature (702)..(703): Xaa can be any proteinogenic amino acid
  misc_feature (705)..(705): Xaa can be any proteinogenic amino acid
MMETASLVRATSVNLDERRKKKNSFINKWKSFRSRTLPIKDIELGETSVDDVISENMEVDLSVKICKEKIRQSFMDCVRGMSRDPKILMDVELRCSINSEELSKVDPNLMLLWACFTRRDDLLPELIKMGANVNFTCPFEGYTPLHLAAFSGCLKSLKWLINEGCNLEVMADSCSPLHFAVLGNNLEAVKILLGAGCKIHNTVLHCAVRTNAVECLPILLSKQVDVNTLDSTGFSPLHIAADTGNISTVKLLLEVENINVDLLTRDRGNTALHYAAEGGHINVIKLLLSKKADVSIRNKKGQIPLHLGTRSQSAECVDLLLKXXXXXXXXXDNENRTPLHTAVGKGLLAYSTVEMLIKGGADVNVKDSFGYTALHIAAVNELTNCVDLLIMNGADVSARTRGGLTALSIIRRKTSASLSTIKKKLDSSVTIHYPEQSYRENEVKLDFRYLLQHSSGGEVGLLKTLVDEGEKGMLDHPLCCAFLHLKWQKIRRFYLLRLFLSAIFVMLLSLYVMTALAHNCYNTANNTTLYYTLKETLKNGTLNCTKQCNQTTNICMKNSIFRNLLLENPFIMELLWYILLVFTIFEVFRKLFGIAGYSSAGQYFGQLINIIEWFTIISVFATSFIYTGTTYEWQNHLGAFGVLCGWTNLMVIIGQLPVFGTYVEMFTKVQAEFFKLFFAYACLLIGFTISFCVIFPTNKAFXXPXIGFIKVLVMMTGELDMDLLSDEDNNPLLLNISAHITFILFLIFVTVVLMNLLVGIAVHDIQGLHKTAGLSKLVRQTDLISFLELSLFQGYLPNQIVEMLKSSLMSPNANRVVLHVKPLNPRENRLPRNILMAALEIARQKRPCTSYRSPGDERPYNEQLLQKIDKLETMLENQKLIMDELLYKLKL

SEQ ID NO: 99 - protein, 918 aa, Nilaparvata lugens
  wtrw-Nlug
MSVSGATLRSTHRPQLDRAVSMNIDDRSYKSKSANPSLIGRWRSFRIKQPHNGMATSILNGRLNLGDSPPAEDDVGFFESLDDNSIPDELSVKICKDSIRQSILDQMKISSGDVKLLLDIESGKATPETLESSIAHCSSLERNFAFLWCTFMKKHEMLEILNRYGIDLNYTLITEGLSAIHLSSFSGCLKCVRWLITRGCNVNHMPDAHTPLHCAVWGNSPETVRLLISNGAIIRETVMHYAVRANAHECLQMLLDEGAEVNWLDVGGSAPLHIAADRRMSLCMKMLLNYGKLDVNIASREKAMTALHYAAEGGYLDCIQMLLSKNADYNKKNKKGQTPLHLAARSQSVECIEALLKAGSNINEKDFENRTPLHSAVGKALLAFNSVESLLRWGADVNVKDKYGYTALHIAALNELVQCVDILIMYGADVSSRTKGGVTALSIVARKTPACLETICKKLDSSISLHDPEASNREVELKLDFRYLLQHSSGGEVGLLKTLIDEGQKSMLEHPLCGAFLYIKWLKIRRFYFCRLFLTAIFVILLTTYILTALAHYCYNSAANRTITDLELCRNNSVFGFVLTENPESMEVIWYILVIFSICEITRKLMSIAGYSTLKYYFFHLGNVFEWFTLISVFVISFEFTGETYTWQNHISAFAILFGWANLMLMVGQLPVFGTYVAMFTKVQQEFLKLLIAYLCLLIGFTISFCVVFPTSEVFRNPLVGMIKVLVMMTGELDIDMLMQKGSNQKASPLSVSAHIIYALFVLLVAVVLMNLVVGIAVHDIQGLHKTAGLSKLVRQTELISFLELALFQGYLPKKVVNMLKWSALIAPAVYRVVLHVKPLNPREKRLPRHILAAAHNIARDCTKNCHGGSMSAATMHRYALSKNNKSLTEELKALREQVQEQQLLLNDILNLLKSKNL

SEQ ID NO: 100 - protein, 916 aa, Acyrthosiphon pisum
  wtrw-Apis
MTGKHHLEVAVPLDRTISLNVHNRQGGAAAASRSPSSLKDRWYSFRHRPGGGGGDQRRRSNVEEFLFMESLPDTPAADEPPSAAGQEIELSITIRKDTIRRDLMDSMRTCNGRLQLMELVELDEFDPGGVHPPPNQSELDRLLCWAVYIGAPTECLDTLHECGANLHYSHCGNITAVHLAAFMGNADALRWLIKKKCDMDTIQSGYTPLHSAVMGNALETTKILIDQRCKVTDTVLHCAVQANAVECVKYLLNIGIDPNTLDTSGNTPLHLAADKGYTECLKLLLARSNKTINLNSKSRQSTALHMAAENGYTECVQILLHTGSSHSAVNYKNQTALHLAAKAQCAESVVILLELGAEVNALDIDKRTALHSAVCKAYLSFHVVEVLVKWGANVNIKDRYGYAPLHIAALNELSQCVDFLIIKGADISSRTVGGMSALSIINRKTPTSINTIKKKFDQAITLNDQASAKEVELIMDFRYLLQNPSQGEIILLHTLEECGQKAMLEHPLCKAFLYLKWQKIRRFYFVRLVFDAIFVLLLTTYVMTALAHDCYNKSRNLTDKKKITHSQELNELENQNACRLNVNVFDSQLISHIIIEFVWYILLIFTIIIIIRKLIGTTGFTSVKQYFLNITNIVEWFVVASVFLTSFLYGNKTYDWQNPIGAFAVLFGWSNLMVMIGQLPIFGTYIAMFTKVQKEFAKLLLAYSCLLIGFTISFCTLFPTSDDFNNPLIGIAKVLVMMTGELDIDLLLKSEESPIIFNVSAYITFILFIVFVTVVLMNLLVGIAVHDIQGLHKTADLSKLVRQTQLIHSQEQALFQGCLPRRVINFFNWSARVTPSAYRVVLYVKPLNPTEKRLPKYIMEDALNIARQQRLNTVDYKQAMLENKMENKALVEEIKQLKEIVQNQQDLLLKLINKSS

SEQ ID NO: 101 - protein, 916 aa, Myzus persicae
  wtrw-Mper
MTGKHHLEVAVPLDRTISLNVHNRQQGGAAAASRSPSSLKDRWYSFRHRPGGGGDQRRRSNVEEFLFMESLPDAPAADEPPSAAGQEIELSITIRKDTIRRDLMDSMRTCNGRLQLMELVELDEFDPGGVHPPPNQSELDRLLCWAVYIGAPAECLDTLHECGANLHYSHCGNITAVHLAAFMGNAEALRWLIKKKCDMDTIQSGYTPLHSAVMGNALETTKILIDQRCKITDTVLHCAVQANSVECVKYLLNIGIDPNSLDTNGNTPLHLAADKGYTECLKLLLARSNKTINLKSKSRQSTALHMAAENGYTECVQILLQTGSSHSAVNYKNQTALHLAAKAQCAESVVILLELGAEVNALDIDKRTALHSAVCKAYLSFHVVEVLVKWGANVNIKDRYGYAPLHIAALNELSQCVDFLIIKGADISSRTVGGMSALSIINRKTPTSINTIKKKFDQAITLNDQASAKEVELIMDFRYLLQNPSQGEIMLLHTLEECGQKSMLEHPLCKAFLYLKWQKIRRFYFVRLVFDAIFVLLLTTYVMTALAHDCYNKSKNLTDKQKITHSQELNESETQNACRLNLNVLDSQLISHIIIEFVWYILLVFTIIIIIRKLIGTTGFTSIKQYFLNITNIVEWFVVASVFLTSFLYGSKTYDWQNPIGAFAVLFGWSNLMVMIGQLPIFGTYIAMFTKVQKEFAKLLLAYSCLLIGFTISFCTLFPTSDDFNNPLIGIAKVLVMMTGELDIDLLLKSEESPIIFNVSAYITFILFIVFVTVVLMNLLVGIAVHDIQGLHKTADLSKLVRQTQLIHSQEQALFQGCLPRRVINFFNWSARVTPSAYRVVLYVKPLNPTEKRLPKYIMEDALNIARQQRLNTVDYKQAMLENKMENKALVEEIKQLKEIVQNQQDLLLQLINKSS

SEQ ID NO: 102 - protein, 854 aa, Diaphorina citri
  wtrw-Dcit
MELDVKKNTLDRSRSFNNDTRFPLALMRSKTSKSYSTKKAMFNQLNDEKPTMVDNMRTDSLEETISDELSYKVCKESIRASLLEAMKMSSGDVNVLYAIENSLYEPDEMATLFSKASQAEKTTALLWCVFVKREDLLDALHQLGADLSNDKYGALHLAAFNGSIKGCSWLMLHGHDINFTKDSYTPLHFAVLGNYVDCAKFLIKNKAHIHETIVHSAVSTNAVDCVQLLLSLQINPNVLNNKGVSPLHIAADRGLISCLKAILDSGMADVDIKTKERRVTALHLAAENGYVECLRILLENHANCNERNHKEQIPLHLAAKCQSVECMEMLLRKGSQVNASDCDNRTPLHASLSKNILSVHPLEILLKWGANVNARDIFGYSPIHIAALSELSQCVDCLIMHGADISSKTPSGSSALSIIMRNTPSSISSVRKKLDSSISLQDPEASTKDIELKLNFKYILQNGPDGEIGMLKIFQNDGQKEILEHPLCEAFLYVKWEKMKKFYLFRLVLSSIFVLVLSVYVLTTLAQDCYNASKNITLFTPTFCTKNSEIGHFLLRNPDFMETVWYVLALLATIELIRKIFGLVEYASFREYCSHVTNLFEWYMIISVFLISCVYTKRTYIWQNHVGAVAVLLGWSNLMGMIGQLPSVGTYVAMFSRVQLEFLKLFQAYICLLVGFTLTFCIVFPSEDRFQNPIIGFINILVMMTGELNVNEVLLGTEAKPPVLLKGTAHIVFTIFMLFVTVVLMNLLVGIAVQDIQGLHKTAGLDKLVRQTELIHSLELALFQGYLPNRIVSMLKSQALLTPSSYTVALNVKPLNPRETRLPKEVMLNALDIARQRRIDPHFIWASEEIFDLE

SEQ ID NO: 103 - protein, 1022 aa, Pediculus humanus
  wtrw-Phum
MELNFTKDYDQKQPFDRSISFGRELSVIDTSQKCRTPSFLERLKSFGEDRASMLQRSKHIDLEDSSSSALDDIIFLDSFEEIHQKGDANVLVSRDVVRQNILDMMKSGSGNVKLLTDIETGNTSVNNIEEHFANSSQFEKNVGFLWSVFHRRRDLLDYFLQFNVDVNFSEPQLGFTPLHLSSFSGCNNCTALLISKGADVNTLTNKYTPLHCAAFGNAASTAKLLLKAGAKIVSEKVCNETPIHSAVRSKAVDCLQLFITENMDLSNMGGCGYSPLHLAADLGHLQCLQILLNSNKCDINLQTLERKCSALHLAAENGYYECLKTLLEYGADSNAVNYRQQTPLHAAAKVCSESVELLLKYGADPNSPDADNRTPMHAAVCKCESEHSLEILDYLTMWKGDVNRRDKYGYTPLHIAALNELTECVECLILSGSDVTARTRGGTSALSIISRKTPAALGAVNQKLDESITTNDPDASKEIVLMFNFRYLLKNCKRGEVSFLQTLVDEGQKEFLSHPLCEAFLHLKWQKIRKYYITRLIFCLLFVILLSLYVLTALAYQCYNDSVSDVFPDVEARILIVDPELCTKKSYFGELLRRNPIIMEMEWFFLVFITVLEIFRKIYGFRGYKSFRHYISQKGNIVEWFVVLSVFLISFVYTGRTYIWQNHVGALAVLCGWANLMIMIGNLPIFGSYVAMYTKVQKEFTKLFLAYICLLIGFTVCFCVIFPKAKQFSNPFVAVIKILVMMTGELEFDSLLENITQEESHSATLLEISALTTFVFFLLFVTIILMNLLIGIAVHDIQGLQKTAVLSKLVGQTKLITHIESALFNGCLPNCFLKLLQITALISPSSYRVVVSVKPLNPRETRLPQDVMRSGLKVAKQKRAKGPTPSARSSMRYPTMKKRKTMMMMNEEVIADMRNALSKLMDEVGTIKRLIMAGERNDILFPLLLTDMLGKVDIECTVENGGPSGQAGALRYAISKTLYTLVDENVRAKMMLAGLTQRDIRRRERKKPGRDGARRRYTWLKR

SEQ ID NO: 104 - protein, 983 aa, Dendroctonus ponderosae
  wtrw-Dpon
MVSSTDERVQTIRMDNLGFQDPHRNSKKLDQSIIVNTESHPLYINQTHVVVPRWRRSHHTDPMAMLEEQYPSEDYDYEYMECGPSPPADHIHNPYYESYEEVPTHELSVQICHDTIRNNLVEHMKASSGKHHYFDDIESKRIVLENLEESFKGANKFEISICFLWAAFLKRWDLLDGILKLGAQLNYYEPNQGLSALHLTAFSSCIPGTQFLIAQGSDVNAIYKWYSPLHCAAFGDSPETAMILLNNGARVQARTNSPTYSNESALHCAVRANAVACVRLFTVEGADVGEVEFSGISPIHLAAELGHPQCLKIMLETKGVNVNARTKEKEQTPLHLAAEGGNAECIDILLDREADANVKNYRLQTPLHLAARAQSYDSVELLLVKGKANPNVPDCDKRISLHAAVGKTARSYDIIEVLVRHQADVNAKDQFGYTPLHMAALNELSQCVEKLLYHGADVTAKSKYGNTALGIIIRKTPASLVMVRQKLDQAITLHRHPESSNREVELKLDFRSILQHCHPREISFLNTFVDEGQKEILLHPLCSAFLYLKWEKIRKYYIARMLFCFIFVLSLSLYVLTALAHNCYNHGKNMNDTQPQNVIELCEKKSMMGHMLRNNPFVIEMQWFALVGITCCEILRKVYGIAGYPSVRQYLSHPENIIEWAVITSVFVISFVYTGRTYTWQNHVGAFAVLFGWTNLMLMVGQLPVFGPYVAMYTRVQKEFAKLLLAYSCLLIGFTISFCVIFPDSSTFANPFIGLITVMVMMSGELSLDLLVDDDPEDPPFLLEISAQVTYIMFLLFVTVILMNLLVGIAVHDIQGLQKTAGLSKLVRQTKLISYIELALFNGYLPRYLLNLLHWTALVSPKAYRVVLNVKPLNPGEKRLPKDILEAAYEIAKRGTMYGQGAAQNSFKMNNNNIMEDLSGLYDIGDSAAITPLHNKVDRNADMIDALGKEIRELRLVLNKNMKLLEQYTVVHRKNSVKTANTS

SEQ ID NO: 105 - protein, 978 aa, Leptinotarsa decemlineata
  wtrw-Ldec
MVYGSENHKPFGMDNYGFQDSSHKKLGRSVSVNVESSNLPLYKTTTSNTLLGWRRTRDDPEDILEEELPSDDFEYMECGPSPPADHTPNIYESFEEFSTSADLTVQICHDTIKMNLMEHMKLSSGRHQLLDDIENRKTTSDNLNEVFHGASKIEINIAFLWAAFMKRWDLFPGLLKLGAQLRYHEPSQGLSALHLTSFSGCVDGTQYLISQGCDVNALFKCYTPLHCAAFGDSPESALVLLNNGAKVQTLTNSPHSCHESVLHCAVRANAIACVRLFTQEGADVGQVEDTGVSPVHLAADLGHPQCLKILLESKTFNVNTRTKEKEQTPLHLAAESGYVDCIEILLDHRADANLSNHRDQTPLHLAARAQAFDCVELLLRKGNANANIGDCDQRTPLHAAVGKAARSYDIIDILLNYGADVNARDQYGYTPLHIAALNELSQCVEILIYHGADVTAKSKFGMTALGIITRKTPASLGMVTHKLDSAITLHHHPESSNREVELRLDFRGILQYCHPREISFLNTFVDEGQKEILLHPLCSAFLYLKWEKIRKYYVARMVFCFIFVLSLSLYVLTALAHNCYNHGKNMNDTQPQNVIELCEKKSMMGHMLRNNPFVIEMQWFVLVGITCCEILRKIYGIAGYPSVKQYLSHRENIIEWTVIVSVFVISFIYTGRTYTWQNHVGAFAVLFGWTNMMLMVGQLPVFGSYVAMYTRVQGEFAKLLLAYSCLLIGFTISFCVMFPDSSTFANPFIGLITVMVMMTGELSLDLLVDDDPEDPPFLLEVSAQVTYILFLLFVTVILMNLLVGIAVHDIQGLQKTAGLSKLVRQTKLISYMELALFNGYLPQYLLNLLHWTALVSPKAYRVVLNVKPLNPREKRLPRDILKAAHDIAKKRKRFGPTVSTNGTIVTCAKKINNNLDQNSEILEYNNTLPLLQNKIDRSAEQIEHLSKEIQSLRSAFEANQKLIEQVLNTILHNRKNSK

SEQ ID NO: 106 - protein, 981 aa, Tribolium castaneum
  wtrw-Tcas
MVAATDNHTTKSLKMDNMGFQDSTNSRKLGRSVSVNAEVESFPLYKTHTCPSGLRWRRPRDDPEIVVEEEFPSDDFEYMECGPSPPADHTPNIYESFEEFSRSELTVQICHDTIKMNLLEHMKMASGRHQLLDDIECKKTTQDTLTEAFQGATKLEINIAFLWAAFMKRWELLDGLLKLGAQLRYYEPSQGLSALHLASFSGCIPGTQFLLAQGCDVNAIFKCYTPLHCSAFGDSPETAMILLNNGAKVQALTNSPNNCHESVLHCAVRANAIACVRLFTAEGADVGQFEFSGMSPVHLAADLGHPQCLKIMLEAKGVNVNAKTKEKELTPLHLAAEGGYVECVEILLDKGADANIRNHRGQTPLHLAARAQAYDCVEMLLRKGNADPNIGDFDKRTPLHAAVCKAARSYDIIEILVSWGADVNTKDQYGYTPLHIAALNELSQCVEILIYHGADVTAKSKFGMTALGIITRKTPASLAMVTHKLDSAITLHHHPESSNREVELRLDFRSILQHCHPREISFLNTFVDEGQKEILLHPLCSAFLYLKWEKIRKYYIARMLFCFIFVLSLSLYVLTALAHNCYNHGKNMNDTQPQNVIELCEKKSMMGHMLRTNPFVIEMQWFVLVGITCCEILRKVYGIAGYPTVKQYLSHPENIIEWTVVVSVFVISFIYTGRTYTWQNHIGAFAVLFGWTNLMLMIGQLPVFGSYVAMYTRVQGEFAKLLLAYSCLLIGFTISFCVIFPDSSTFANPFIGLITVLVMMTGELNLDLLVDDDPEDPPFLLEISAQVTYILFLLFVTVILMNLLVGIAVHDIQGLQKTAGLSKLVRQTKLISYMELALFNGYLPRYLLNLLHWTALVSPKAYRVVLNVKPLNPREKRLPRDILKAAHEIAKKRKHYAHTISSHGSNATTRKIINNNMDQNSEILEYPSAFPLLQSKIEKSTEQIEHLSKEVRELKIALQNNQKIMEQLLHGLVNTKNSSNC

SEQ ID NO: 107 - protein, 981 aa, Plutella xylostella
  wtrw-Pxyl
MDNFGYREMTWPSPQQTPTRPRFQRSSSRYSTREPEEFPLNDANVVYRQSRKIDFLESDKDPGSPMPNKEYIFVGPSPPADDAPNMYQSFDIRAPDPEARLTEDVVRRSVCERALTLGAGRFFDDIECGLITAQNVEEQIGSAPEVVVNLTLLWAAFLGKDELLPAILDAGADIHNSEPLGLTALHLAAYSNATKAALYLLCRGADVDYVPKYFAPIHCSAFGNALEVAEVLIANGASLHAVVQRAGCEDNLVHCAVRADAAECMELFIERGVDPAYVTSGGLNALHLAADLGALRCLSYLIRETKIGVNGMTKQRDKECTALHLAASKGNTECVEMLLIENAKANTRNYRGFTPLHLAAMCSSVECVEVLLRDGNADPNAEDADKRTPLHAAIRPSERACDIIDTLISWGAQVNKKDVYGFSPLHIAAMDGISQCVETLIYLGADVISKSKRGNTALSVIARKMPKSLAILRHDLDSGISLSRQTEANEEVQIEFDFGRILKFSYPREITYLNHLVDEGQKDILLHPLCSAFLFMKWRKIRKFYLVRLIFCFLFVSFLSMYVLATVVKTCDGKFSEKYGVKNELCQKQSILGGFLEGNPIEMERWVLISITVMEIIRKLTGITGYSTFRQYVTTFENLLEWFVLLSVFSLYSIRKDYSWQNHVGGYAVLGAWTNLMLMMGQLPMFGDYVAMYQKVLAEFLKLLLAYVCLLLGFTICFCVVFPNEEMFSNPLMGFITTLSMMVGELNLSILINDPVLDDPPLTFELSSQFIFILFLMFVTIILMNLLVGIAVHDIQGLRKTAGLSKLVRQTKLILFVEMGMFSALLPKFLLKFLYRTALVSPEAGKVILSVKPLNPRENRLPTDIMMAAYELAQLNKVQTGKSVREVLKINKFSKPKKESQTPDNNINVEIRGMQEKVDQTTFNLKKIDQEMRYLNTLLLEQQQLLQKLVKVASDRPAQYLPIEPAYPESPVFISSNSLEK

SEQ ID NO: 108 - protein, 967 aa, Trichoplusia ni
  wtrw-Trni
MDNFGYREMGWPSPLQTPTPTPSRFRFSGSVRSRTPREPEEFPLNSSYKPNFDLLESAREPGKAKEYLFVGPSPPAEDAPNMYHSFDVLAPDPEARLTEDVARRGLCEKALSLGAARFFDDVECGLITTDNIEEHISSAPEVVVNLTLMWAAFLARDELMPAILEAGADIHYSEPAGLTALHLAAFSGAGRAAVFLLSRGADVDFAPKYFAPLHCAAFGNSLEVAEILIANGASLHAVVQRAGCEDNLVHCSVRADAVECMELFIERGVDPAYVTSGGLNALHLAAELGAQRCLSYLLKETKISVNGVTKQRDKECTAIHLAAARGYAECLELLLSEGAKANTKNYRGFTALHLAARCSSIECVEVLLRDGNADPNAEDYDKRTPLHAAIGRAERACDIIDMLVSWGAQVNKKDEYGYSPLHLAAMDNLTQCVETLIFLGADVTSKSKKGHTALSVIARKTPKSLAILRHNLDCGISLNQPSEANEEVQIEFDFGRLLKFSYPREITYLNSLIDEGQKDILLHPLCSAFLFMKWKKIRKFYLARLIFCFLFVSFLSIYVLTAVVKTCNGKYAQKYGVLNELCQKQSILGLILTNNPIEFERWVLMAITAFEILRKLTGITGYSSIYQYFATFENLMEWFVLLSVFSLYKIQNDYSWQNHVGGYAVLGAWTNLMLMMGQLPMFGDYVAMYQKVLTEFLKLLLAYMCLLLGFTICFCVVFPNEEMFSNPLMGFISTLSMMVGELNLNILINDPTKDDPPLIFELSAQIIFILFLMFVTIILMNLLVGIAVHDIQGLRKTAGLSKLVRQTKLILFVEMGMFSAWLPKCLHKYVYRTALVSPEAGKVILSVKPLNPREKRLPTDIMMAAYELAQLNKVKSGRSIKEILYKNKYTSKLKNEGQFANDHNFSLEIRGMQEKIDQATFNMKKIDQEIRHMNTLLMDQQTLLHNFFKSPVFFTSTSQSQHSDSIK

SEQ ID NO: 109 - protein, 976 aa, Amyelois transitella
  wtrw-Atra
MPTTRRLLSSRWFRTRRSPNPEELDDVRPRTLPRSDMDRRPRVSRVLSSPARTQHQSHPPLDEESLERAYPSMGHLEYVLAGSSPPAESAPNMYDSFEEPPLDLTAHICSDSLRQSAHEQMRAVGGRLRLLDELESGVLTVESASETFSTASEAEKNVCLFWAAFLKLANWLPPLVEAGANPLYYDTLGLSPLHVAAFSGSTECANYLLSCEVDPNYMPRCFAPLHCAAFGNSVQVANLLISRGASVHAAVKYVNCEGGLLHCAVRANSVECLKLFISHGVDVNQIESGGTNAIHLAADLGMIQCLTILLETPGADPNVRTRVGDRESTALHLAADGGFIECVDLLLTKGADASLKNHRGFTALHLAARSASLECVESLLRKGNANPNSMDFDMRTPLHAAIGKSDSACDIIETLISWGANVNQKDEYGFTPLHLAALDGLSACVETLIYHGADVTTRSKKGNSALNVIARKTPASLAMITRKLDCAITLHHSQSSNREVELELDFRSILQHCYPREISYLNTFVDEGQKEVLLHPLCSAFLYIKWEKIRKYYVARLFLSFIFVLCLTLYVLTALAHNCYNGSKDMEETIQEQELCQKQSILGDLLRKNPFVIEMQWWVLAGITIFEIFRKVYGIAGYSTVKQYLMQCENIIEWFVIVSVFLISYIYTNITYTWQNHVGAFAVLAGWTNLMMMIGQLPVFGTYVAMYQKVQKEFAKLLMAYSCILIGFTISFCVIFPDSSSFANPFMGFITVLTMMIGELNLDLLLNEPDGNDPPVLLEFSAQITYVLFLMFVTVVLMNLLVGIAVHDIQGLRKTAGLSKLVRQTKLISYMEMALFNGYLPKCLLKILHSSALVSPQAYRVVLSVKPLNPSEKRLPRDIMMAAYDIAKMRKQYGHTISSSGSTTGAYSCFKKYENNNDSSYREYGYSSGLGSLQVRLDETSENVRQLTQEVRELKKLISAQQLVIQQALAGAMDNR

SEQ ID NO: 110 - protein, 972 aa, Helicoverpa armigera
  wtrw-Harm
MPATRRLLTARWFARRRQPDEDDARPRTLPRSDMDRRPRVSRVLSSPARTQHQTHPPLDEESLERAYPSMGHLEYVNAGSSPPAESAPNMYDSFEEPPLDLTAHICEDSLRQSAHEQMRGFGGRLRLLDELETGVITAESAATTFSTASEAEKNICLFWAAFLKLTNYLQPLIEVGADPLYFDALGLSPLHVAAFSGSTECANYLLSCGSDPNYMPRCFAPLHCAAFGNSVQVANLLISRGASVHCAVKYVNCEGGLLHCAVRANSVECLKLFISHGVDVNQIEPGGTNAIHLAADLGMFQCLSILLETPGADPNVRTRVGDRESTALHLAADGGFVECVDLLLSKGAEASLKNHRGFTALHLAARSSSLECVESLLRKGNAEPNANDFDMRTPLHAAIGKSDSACDIIETLISWGANVNQKDEYGFTPLHLAALDGLSACVETLIYHGADVTTRSKKGNSALNVIARKTPASLAMVTRKLDCAITLRHSQTSNREVELELDFRSILHHCYPREISYLNTFVDEGQKEVLLHPLCSAFLYIKWEKIRKYYVARLFLSFIFVLCLTLYVLTALAHNCYNGSKDMEETIQEQELCQKQSILGDLLRKNPFVIEMQWWVLAGITIFEIFRKVYGIAGYSTVKQYLMQSENIIEWFVIVSVFLISYIYTNITYTWQNHVGAFAVLAGWTNLMMMIGQLPVFGTYVAMYQKVQKEFAKLLMAYSCILIGFTISFCVIFPDSSSFANPFMGFITVLTMMIGELNLDLLLNEPDGNDPPVLLEFSAQITYVLFLMFVTVVLMNLLVGIAVHDIQGLRKTAGLSKLVRQTKLISYMELALFNGYLPKCLLKILHSSALVSPQAYRVVLSVKPLNPSEKRLPRDIMMAAYDIAKMRKQYGHTISSSGSTTGAYSCFKKYENNNDSGYREYGYSSGLGSLQARLDETSENVRQLTQEVRELKKLINAQQLVLQQALSGAMDR

SEQ ID NO: 111 - protein, 972 aa, Spodoptera littoralis
  wtrw-Slit
MPATRRLLTARWFARRRQPDEDDARPRTLPRSDMDRRPRVSRVLSSPARTQHQTHPPIDEESLERAYPSMGHLEYVNAGSSPPAESAPNMYDSFEEPPLDLTAHICGDSLRQSAHEQMRAVGGRLRLLDELETGVITADSAATTFSTATEAEKNVCLFWAAFLKLANLLQPLIEVGADPLYFDALGLSPLHVAAFSGSTECANYLLSCGSDPNYMPRCFAPLHCAAFGNSVQVANLLISRGASVHCAVKYVNCEGGLLHCAVRANSVECLKLFISHGVDVNQIEPGGTNAIHLAADLGMFQCLTILLETPGADPNVRTRVGDRESTALHLAADGGFVDCVDLLLSKGADASLKNHRGFTALHLAARSSSLECVESLLRKGNAEPNANDFDMRTPLHAAIGKSDSACDIIETLISWGANVNQKDEYGFTPLHLAALDGLSACVETLIYHGADVTTRSKKGNSALNVIARKTPASLAMVTRKLDCAITLRHSQTSNREVELELDFRSILHHCYPREISYLNTFVDEGQKEVLLHPLCSAFLYIKWEKIRKYYVARLFLSFIFVLCLTLYVLTALAHNCYNGSKDMEETIQEQELCQKQSILGDLLRKNPFVIEMQWWVLAGITIFEIFRKVYGIAGYSTVKQYLMQSENIIEWFVIVSVFLISYIYTNITYTWQNHVGAFAVLAGWTNLMMMIGQLPVFGTYVAMYQKVQKEFAKLLMAYSCILIGFTISFCVIFPDSSSFANPFMGFITVLTMMIGELNLDLLLNEPDGNDPPVLLEFSAQITYVLFLMFVTVVLMNLLVGIAVHDIQGLRKTAGLSKLVRQTKLISYMELALFNGYLPKCLLKILHSSALVSPQAYRVVLSVKPLNPSEKRLPRDIMMAAYEIAKMRKQYGHTISSSGSTTGAYSCFKKYENNNDSGYREYGYSSGLGSLQARLDETSENVRQLTQEVRELKKLINAQQLVLQQALSGAMDL

SEQ ID NO: 112 - protein, 973 aa, Papilio xuthus
  wtrw-Pxut
MPTARSLLSRRWLRTRRAPHASEPEPDPGTMERRQRVARALSSPARAQQPPADEESLERAFPSTGHLEYVLAGSSPPAESAPNMYDSFEEPPLDLTAHICGDSLRQSAHEQMRAVGGRLRLLDDLESGVITPETALDTFTNATEAERNVCLFWAAFLKQDQLLPALMETGADPLYFDALGLSSLHAAAFSGSSECANYLLSCGADPNYMPRCFAPLHCAAFGNSVQVANLLISRGASVHAAVKYVNCEGGLLHCAVRANSLECLKLFISHGIDVNLIEPGGTNAIHLAADLGMIQCLVILLDTPGADPNVRTRVGDRESTALHLAADGGFADCVDLLLSKGADASLKNHRGFTALHLAARSASLECVESLLRKGNAEPNAMDFDMRSPLHAAIGKSDSACDIIETLISWGANVNQKDEYGFTPLHLAALDGLSACVETLIYHGADVTTRSKKGNSALNVIARKTPASLAMVTRKLDCAITLHHSQTSNREVELELDFRSILQHCYPREISYLNTFVDEGQKEVLLHPLCSAFLYIKWEKIRKYYVARLFLSFIFVLCLTLYVLTALAHNCYNGSKDMEETIQEQELCQKQSILGDLLRKNPFVIEMQWWVLAGITIFEIFRKVYGIAGYSTVKQYLMQSENIIEWFVIVSVFLISYIYTNITYTWQNHVGAFAVLAGWTNLMMMIGQLPVFGTYVAMYQKVQKEFAKLLMAYSCILIGFTISFCVIFPDSSSFANPFMGFITVLTMMIGELNLDLLLNEPDGNDPPVLLEFSAQITYVLFLMFVTVVLMNLLVGIAVHDIQGLRKTAGLSKLVRQTKLISYMELALFNGYLPKCLLKILHSSALVSPQAYRVVLSVKPLNPSEKRLPRDIMMAAYDIAKMRKQYGHTISSNGSTTGTYSCFKKYENNNDSSYREYGYSGLGSLQARLDETSENVRQLTQEVRELKKLISAQQLVIQQALAGAAREGAGRPLIT

SEQ ID NO: 113 - protein, 943 aa, Papilio machaon
  wtrw-Pmac
MERRQRVARALSSPARAQQPPADEESLERAFPSTGHLEYVLAGSSPPAESAPNMYDSFEEPPLDLTAHICGDSLRQSAHEQMRAVGGRLRLLDELESGVITPETALDTFTNATEAERNVCLFWAAFLKQDQLLPALMETGADPLYFDALGLSSLHAAAFSGSSECANYLLSCGADPNYMPRCFAPLHCAAFGNSVQVANLLISRGASVHAAVKYVNCEGGLLHCAVRANSVECLKLFISHGIDVNLIEPGGTNAIHLAADLGMIQCLVILLDTPGADPNVRTRVGDRESTALHLAADGGFADCVDLLLSKGADASLKNHRGFTALHLAARSASLECVESLLRKGNAEPNAMDFDKRSPLHAAIGKSDSACDIIETLISWGANVNQKDEYGFTPLHLAALDGLSACVETLIYHGADVTTRSKKGNSALNVIARKTPASLAMVTRKLDCAITLHHSQTSNREVELELDFRSILQHCYPREISYLNTFVDEGQKEVLLHPLCSAFLYIKWEKIRKYYVARLFLSFIFVLCLTLYVLTALAHNCYNGSKDMEETIQEQELCQKQSILGDLLRKNPFVIEMQWWVLAGITIFEIFRKVYGIAGYSTVKQYLMQSENIIEWFVIVSVFLISYIYTNITYTWQNHVGAFAVLAGWTNLMMMIGQLPVFGTYVAMYQKVQKEFAKLLMAYSCILIGFTISFCVIFPDSSSFANPFMGFITVLTMMIGELNLDLLLNEPDGNDPPVLLEFSAQITYVLFLMFVTVVLMNLLVGIAVHDIQGLRKTAGLSKLVRQTKLISYMELALFNGYLPKCLLKILHSSALVSPQAYRVVLSVKPLNPSEKRLPRDIMMAAYDIAKMRKQYGHTISSNGSTTGTYSCFKKYENNNDSSYREYGYSGLGSLQARLDETSENVRQLTQEVRELKKLISAQQLVIQQALAGTARDGAGRPLIT

SEQ ID NO: 114 - protein, 971 aa, Vanessa tameamea
  wtrw-Vtam
MPTTRSLLSSRWFRSRRAPRLDEPDDTTGNQPQNMDRRPRVARVLSSPARAQTAPLDEESLERAFPSMGHLEYVLAGSSPPAESAPNMYDSFEEPPLDLTAHICADSLRQSAYEQMRAVGGRLRLLDELESGVITIDTAVNTFTTASEAERNVCLFWVAYLKYDHFLQPLVEAGADPLYFDALGLSPLHAAAFSGSTECANYLLSCGADPNYMPRCFVPLHCAAFGNSVQVANLLINRGASVHAAVKYINCEGGLLHCAVRANSVDCLKLFISHGVDVNQIEPGGTNAIHLAADLGMIQCLAILIETPGADPNVRTRVGDRESTALHLAADGGFVECVDLLLNKGADASLKNHRGFTALHLAARSSCLECVESLLRKGNAEPNSMDFDKRTPLHAAIGKSDSACDIIETLISWGANVNQKDEYGFTPLHLAALDGLSACVETLIYHGADVTTRSKKGNSALNVIARKTPASLAMITRKLDCAITLHHSQTSNREVELELDFRSILQHCYPREISYLNTFVDEGQKEVLLHPLCSAFLYIKWEKIRKYYVARLFLSFIFVLCLTLYVLTALAHNCYNGSKDMEETIQEQELCQKQSILGDLLRKNPFVIEMQWWVLAGITIFEIFRKVYGIAGYSTVKQYLMQSENIIEWFVIVSVFLISYIYTNITYTWQNHVGAFAVLAGWTNLMMMIGQLPVFGTYVAMYQKVQKEFAKLLMAYSCILIGFTISFCVIFPDSSSFANPFMGFITVLTMMIGELNLDLLLNEPDGNDPPVLLEFSAQITYVLFLMFVTVVLMNLLVGIAVHDIQGLRKTAGLSKLVRQTKLISYMELALFNGYLPKCLLKILHSSALVSPQAYRVVLSVKPLNPSEKRLPRDIMMAAYDIAKMRKQYGHTISSNGSTTGAYSCFKKYENNNDSGYREYGYSSGLGSLQARLDETSENVRQLTQEVKELKKLISAQQLVIQQALSVAIDNR

SEQ ID NO: 115 - protein, 903 aa, Bombyx mori
  wtrw-Bmor
MGHLEYVLAGSSPPAESAPNMYDSFEEPPLDLTAHICADSLRQSAHEQMRAVGGRLRLLDELESGVIPADATTDAFATATDAEKNVCLFWTAFLKLANLLPPLIEVGADPLYYDSLGLSPLHVAAFSGSVECASYLLSCGADPNYMPRCFAPLHCAAFGNSVQVANLLIARGASVHAAVKYINCEGGLLHCAVRANSAECLKLFISHGVDVNLIEPGGTNAIHLAADLGVKQCLIILLDTPGADPNVRTRVGDRESTALHLAADGGFVECVDLLLSKGADASLKNHRGFTALHLAARSASLECVESLLRKGNADPNAMDFDKRTPLHAAIGKSDSACDIIETLISWGANVNQKDEYGFTPLHLAALDGLSACVETLIYHGADVTTRSKKGNSALNVIARKTPASLAMVTRKLDCAITLHHSQSSNREVELELDFRSILQHCYPREISYLNTFVDEGQKEVLLHPLCSAFLYIKWEKIRKYYVARLFLSFIFVLCLTLYVLTALAHNCYDGSKDMEETIQEQELCQKQSILGDLLRKNPFVIEMQWWVLAGITIFEIFRKVYGIAGYSTVKQYLMQSENIIEWFVIISVFLISYIYTNITYTWQNHVGAFAVLAGWTNLMMMIGQLPVFGTYVAMYQKVQKEFAKLLMAYSCILIGFTISFCVIFPDSSSFANPFMGFITVLTMMIGELNLDLLLNEPDGNDPPVLLEFSAQITYVLFLMFVTVVLMNLLVGIAVHDIQGLRKTAGLSKLVRQTKLISYMELALFNGYLPKCLLKILHSSALVSPQAYRVVLSVKPLNPSEKRLPRDIMMAAYDIAKMRKQYGHTISSSGSTTGAYSCFKKYESNNDSGYREYGYSGLGSIHARLDETSEHVRQLTQEVKELKKLINAQQLVIQQALVGAMDRP

SEQ ID NO: 116 - protein, 996 aa, Anopheles gambiae
  wtrw-Agam_2
MNENGPRNENSTKTANIQNNISDVTAGIRRSSADNHNVSAATVNGSFTTTTNTNTKTTASHSGTGQPNGRKSHVDCYEYMEVGPSPPAEGAPNLYDSYDESYSESSAQLCNDIIRISLTEQMRLAGGRVALLETTNTSTTTFPTNNSVSVGGQQLEKNICFLWAAFLRKFHLLDQCVRLGADINFCDSNGLTALHLASFSGCTECCAFLIQHGLDVNMQPKWYTPLHCAAFGNSLATAELLIKNGARIDVPTNKQHCEESLLHCAVRSNAIDCLRFFIAHGSNVNALERNGTNPIHLAADLGHTQCLAALLECPNADPNIRIQQGDKQMTALHLAADEGNLDCVTQLLARGADVRARNHRGFTPLHLAARSGSADCVEALLKLGGCDPNMADFDQRTPLHAAVSKSDTAVEMIETLIAWGANVNQRDVYGFTALHLAALDALGPCVETLLYHGADVTMKSRKGTSALNIISRKTPASLGVIQCKLDAAITLTHSQDSSSREVELELDFRSILQHCHPREISYLNTFVDDGQKEFLQHPLCSAFLYIKWNKIRKYYIARLLFCFTFVLFLTLYVLTALAHNCYNGSKDMKETIQEQELCQKQSIFGDMLRNNPFVIEMQWMVLVAITAIEICRKIYGITGYTSLKHYVTQTENAIEWFIILSVFVISYIYTKRTYTWQNHVGAFAVLLGWTNLMLMIGQLPVFGAYVAMYTKVQVEFAKLFMAYSCMLIGFTISFCVIFPSSSSFANPFMGFITVLVMMTGEQDLELLINDPDGKDPPFLLEISAQITFVLFLLFVTVILMNLLIGIAVHDIQGLKKTAGLSKLVRQTKLISYIESALFNGWLPNWLRNLLYYTALVSPQAYRVVLSVKPLNPGETRLPRDIMMAAYEVAKQKKHYSKTYKRTDSSCNVSNCRRAAHTGMGVASTNNDHTTKFGYVYDTPTLYGLTNKLDEHNDYIGNIATEIAELRSTIEENQQMLRQVLELLSKSQTHNIQSNQL

SEQ ID NO: 117 - protein, 968 aa, Aedes aegypti
  wtrw-Aaeg
MENFGYKEGSAKPKRRVGTRSTKIKTQQVPIAMKPRFSLTPDVTVHWRNDPETVLAEDFEYMKIGPSPPAENAPNMFDNYEETNAEFGFEVSSETIRTSLMEQMRLSSGRLKLLDNIDQGNIIAANTKEMFEGATKAERNISFLFAAFLKRWDLLESLLECGAELIFSDSNGFSALHLSSFSGCLNCTSFLVSKGIEINMQPKAFTPLHCAAFGNSVEVARYLITKGGKLNINTKKQNCEESLLHCAVRSNAIDCVKLFISEGMDVNSLKPSGMNAIHLAADLGYVDCLKALLDFPTADPNIRIGIREKESTALHLAADEGNVECVNLLLAKGADAKLKNHRGFTPLHLAARTSSLECVELLLRIGSADPNAEDFDQRTPLHAAIGKSDMAFDIIETLICWGADVNSKDVFGFTPLHLAALDGLAHCVEILIYHDADVTTKSKKGTTALNVITRKTPASLAMISRKFDDAMTLIHSQDPSDNEVVLELDFRSILQHCYPREISYLNTLVDEGQKEILQHPLCSAFLYIKWGKIRKYYIARLLFCFIFILFLTLYVLTALAHNCYNGSKDMEETIQEQELCQKQSILGNMLRNNPFVMEMQWMVLVAITFVEICRKLYGMTGYSSIRRYVTQVENVTEWFIIVSVFVISYIYTKRTYTWQNHIGAFAVLLGWTHLMVMIGQLPVFGAYVAMYTKVQVEFAKLFIAYSCMLVGFTISFCVIFPSSSSFENPFMGFITVLVMMIGEVDLELLINDPDGKDPPFMLELSAQITFVLFLLFVTVILMNLLVGIAVDDIQALKKTATLSKLVGQTKLISYIESALFNGWLPNWLRSLLHYTALVSPQAYRVILSVKPLNPEEKRLPRTIMMAAYEVAKSKKQSGATTISNPAAYKYRFQNGNVVSSQQANCNQPLERIIESDYGFETASLCTLTTKIDESSEKLDELSKELLELKTVLKHNQCLVDKISKILLR

SEQ ID NO: 118 - protein, 979 aa, Culex quinquefasciatus
  wtrw-Cqui
MENFGYKEGSTKPKQRRLGSSRSTKIKSTQVAPAPVSAKPRFSLTPDVTVHWRNDPEAVLAEDFEYMKIGPSPPAESAPNMFENYEESAVEFGFEVSAETIRTSLMEQMRISSGRLKLLDNIEQGNICAANVREMFEGSSKAEKNISFLFAAFLKRWDLLEGLLECGAELIYFDSNGFSALHLSAFSGCLNCTSLLVSRGIDVNMQPRAFTPLHCAAFGNAVEIARFLINKDGKQCINTKKQNYEESLLHCAVRSNAIDCVKLFISEGMDVNSLKPSGMNSIHLAADLGYVECLKVLLDCPTADPNIRIGIREKESTALHLAADEGNVESVSLLLAKGANAKLKNHRGFTPLHLAARTSSFECVELLLRVGNADPNAEDFDQRTPLHAAIGKSESAFDIIETLICWGADVNKKDVFGFTPLHLAALDGLAHCVEILIYHDADVTTKSKKGTTALNVITRKTPSSLAMINRKFDDAMTLIHSQDPSDKEVVLELDFRSILQHGYPRETSYLNTLVDEGQKEILQHPLCSAFLYIKWGKIRKYYIARLLFCFIFILFLTLYVLTALAHNCYNGSKDMEETIQEQELCQKQSILGNMLRNNPFVMEMQWMVLVAITFVEICRKLYGMTGYSSIRRYITQMENVTEWFIIVSVFVISYIYTKRTYTWQNHIGAFAVLLGWTHLMVMIGQLPVFGAYVAMYTKVQVEFAKLFIAYSCMLVGFTISFCVIFPSSSSFENPFMGFITVLVMMVGELDLELLINDPDGKDPPFMLELSAQITFVLFLLFVTVILMNLLVGIAVDDIQALKKTATLSKLVGQTKLISYIESALFNGWLPNWLRSLLHYTALVSPQAYRVILSVKPLNPEEKRLPRAIMMAAYEAAKKGSKLQPGLSNPVVFKYRFQNGTPGTDPQSIGGAQIDPNAPPLEKIVESDYGFETASICTLATKIDESAEKLDELAKELAELKAVLKYNQSVVDKICKILSK

SEQ ID NO: 119 - protein, 979 aa, Anopheles gambiae
  wtrw-Agam_1
MENFGYKEGSSKPTRRLTAKSMKRRNSQIPIKPRFSISPELNVHWMNDQEAMVTEDFEYMKIGPSPPAESAPIIFDSYEESSPEFGIELSSDSIRTALIEQLRLASGRAHLLDSIEQGNMVASNVGEFFGGASKTEKNICFLWAAFAKRWDLLDALMEHGSELAYHDTNGFTALHLSAFSGCLNCASVLVAKGIDVNLQPKAYTPLQCAAFGNAAHTALLLLSKGARLDLCTRRPGGEETLLHCAVRANALDCVRLFIAEGMDVNSIKPSGMNAIHLAADLGHVECLRVLLAAPGADPNIRIGIREKESTALHLAADEGNAACVALLLEQGAEARLKNHRGFTPLHLASRTSSLECVDLLLRAGSADPNEEDFDMRTPLHTAIGRSESAFHIIETLICWGADVNKKDVFGFTPLHLAALDGLAHCVEILLFYDADVTAKTKKGTTALNVITRKTPGSLAMITQKFDDAMTLIHSQNPSEKEVELELDFRTILQHCYPREISYLNTLVDEGQKEMLQHPLCSAFIYIKWGKIRKYYIARLLFCFIFILFLTLYVLTALAHNCYNGSKDMEETIQEQELCQKQSILGNMLRRNPFVMEMQWLVLVAITFVEICRKLYGITGYSSIRRYVTQMENITEWFIIVSVFVISYIYTKRTYTWQNHIGAFAVLLGWTHLMVMIGQLPVFGAYVAMYTKVQVEFAKLFIAYSCMLVGFTISFCVIFPSSSSFENPFMGFITVLVMMVGELDLELLINDPDGKDPPFMLELSAQITFVLFLLFVTVILMNLLVGIAVDDIQALKKTATLSKLVGQTKLISYIESALFNGWLPNWLRSLLHYTALVSPRAYRVILSVKPLNPEEKRLPRNIMMAAYEIAKEKEQQLAAVGEPTAVPPGATGGEPGAAQSLPGSGAESPVSPNAPDGGVGGGGGGEGARATDTLDALATKIDQSAERMSDVTRELQELRAVLKQNQQLIDEIARQVCGRE

SEQ ID NO: 120 - protein, 938 aa, Lucilia cuprina
  wtrw-Lcup
MVRWRNNTDAMIEAQYPTPGEFEYMECGPSPPAESAPSMYDSFEEPTSELSVQICNDTLRISLIDQMKNAAGRIRYFEDIEQGNVIGENTKTHFESASQIEKNLCFLWSAFLKRWDLLQSLLDIGAELNFCDQNGITALHLGAFSGCLSTLTFLVGKGMNVNFQPKCYTPLHCAAFGNSPEAAKYLISNGAQLTIDTNKPNCEESLLHCAVRANALECLQLFIDEGADVNSLKPNGTNAIHLAADLGNAQCLEILLKANGADPNVRICIREKESTALHLAADEGNVECVDLLLAKGADAKLKNHRGFTALHLAARTSSLECVESLLRNGNADANAEDFDHRTPLHAAVGKSENAFDILELLIQWGANVNHKDIYGFTALHLAALDGLAQCVEMLIYHGADVTTKSKKGTSALNVITRKTPASVAMIRQKLDAAITLHHSQDPVNREVELELDFRQLLQHCHPREISYLNTFVDEGQKEILEHPLCSSFLYIKWGKIRKYYIGRLIFCFFFILFLTLYVLTALAHNCYNGSKDDNTTIQAQELCQKQSILGDMLRNNPFVMEMQWWVLVAITVVEIFRKLYGITGYSSFKHYVTQVENIMEWFVITSVFVISYIYTKQTYTFQNHIGAFAVLLGWTNLMLMIGQLPVFDVYVAMYTRVQGEFAKLFMAYSCMLIGFTISFCVIFPSSSSFANPFMGFISVLVMMIGEQDLSLLINDPDGKDPPFLLEVSAQITFVLFLLFVTIILMNLLVGIAVHDIQGLKKTAGLSKLVRQTKLISYIESALFNGYLPTWLRNLLHYTALVSPQAYRVVLCVKPLNPSEKRLPRDILMKAYEVGKMRKHFGHTISAKSSDATYLSYKNKYNSESNQTPTTPYATEDFEATVLSNINTKIDDNSERIEYLTQEIQELKQALITQQQQASKVIDKLLIVISNQQKNNLRK

SEQ ID NO: 121 - protein, 988 aa, Musca domestica
  wtrw-Mdom
MENLGYKEGSTKPRRMTRSISVVTKSDAEQPLAGNNTNRLKSIPPNLMVRWRNNTDAMIEAQYPTPGEFEYMECGPSPPAESAPSMYDSFEEPTSELSVQICNDTLRISLIDQMKNAAGRIRYFEDIEQGNVIGDNTKTHFESASQIEKNLCYLWSAFLKRWDLLQSLLDIGAELNFCDQNGISAMHLGAFSGCLSTLNFLVQKGMNVNFQPKCYTPLHCAAFGNSTEAAKYLINNGAQISIDTTKPNCEESLLHCAVRANALECLQLFINEGADVNSLKPNGTNAIHLAADLGNAQCLEILLRAPGADPNVRICIREKESTALHLAADEGNVECVDLLLAKGADAKLKNHRGFTALHLAARTSSLECVESLLRNGNADPNAEDFDHRTPLHAAIGKSENAFDIMELLIQWGANVNHKDIYGFTALHLAALDGLAPCVEMLIYHGADVTTKSKKGTSALNVITRKTPASVAMIRQKLDAAITLHHSQDPVNREVELELDFRQLLQHCHPREISYLNTFVDEGQKEILEHPLCSSFLYIKWGKIRKYYIGRLIFCFIFVIFLTIYVLTALAHNCYNVSNNDNSTIQAQELCQSQSILGDMLRSNPFVMEMQWGVLVAITIVEICRKLYGITGYSSFRHYVTQVENIMEWFVITSVFLISYVYTKKTYTFQNHIGAFAVLLGWTNLMLMIGQLPVFDVYVAMYTRVQGEFAKLFMAYSCMLIGFTISFCVIFPSSSSFANPFMGFISVLVMMIGEQDLSLLINDPDGKDPPFLLEVSAQITFVLFLLFVTIILMNLLVGIAVHDIQGLKKTAGLSKLVRQTKLISYIESALFNGYLPTWLRNLLHYTALVSPQAYRVVLCVKPLNPSEKRLPRDILMKAYEVGKMRKHFGHTISAKNSDATYLSYKNKYNSESVQTPTTPSTPYAPEDFEATVLANINTKIDDNTDRIEYLTQEIQELKQALITQQQQASKVIDKLLIVISNQQKNNLRK

SEQ ID NO: 122 - protein, 988 aa, Stomoxys calcitrans
  wtrw-Scal
MENLGYKEGSTKPRRMTRSISVVTKSEAEQPLAGNNTSRFKSIPPNLMVRWRNNTDAMIEAQYPTPGEFEYMECGPSPPAESAPSMYDSFEEPTSELSVQICNDTLRISLIDQMKNAAGRIRFFEDIEQGNVIGDNTKTHFESASQIEKNLCYLWSAFLKRWDLLQSLLDIGAELNFCDQNGITALHLGAFSGCLSTLSFLVQKGMNVNFQPKCYTPLHCAAFGNSTEAAKYLINNGAQISIDTTKPNCEESLLHCAVRANALECLQLFINESADVNSLKPNGTNAIHLAADLGNAQCLEILLQAQGADPNVRICIREKESTALHLAADEGNVECVDLLLAKGADAKLKNHRGFTALHLAARTSSLECVESLLRNGNADPNAEDFDHRTPLHAAIGKSENAFDIMELLIQWGANVNHKDIYGFTALHLAALDGLAQCVEMLIYHGADVTTKSKKGTSALNVITRKTPASVAMIRQKLDAAITLHHSQDPVNREVELELDFRQLLQHCHPREISYLNTFVDEGQKEILEHPLCSSFLYIKWGKIRKYYIGRLIFCFIFVIFLTIYVLTALAHNCYNVSNNDNSTSQAQELCQSQSILGDMLRSNPFVMEMQWGVLVAITIVEIFRKLYGITGYSSFRHYVTQVENIMEWFVITSVFLISYVYTKKTYTFQNHIGAFAVLLGWTNLMLMIGQLPVFDVYVAMYTRVQGEFAKLFMAYSCMLIGFTISFCVIFPSSSSFANPFMGFISVLVMMIGEQDLSLLINDPDGKDPPFLLEISAQITFVLFLLFVTIILMNLLVGIAVHDIQGLKKTAGLSKLVRQTKLISYIESALFNGYLPTWLRNLLHYTALVSPQAYRVVLCVKPLNPSEKRLPRDILMKAYEVGKMRKHFGHTISAKNSDATYLSYKNKYNSESLQTPTTPSTPYAPDDFEATILANINSKIDDNTDRIEYLTQEIQELKQALITQQQQASKVIDKLLIVISNQQKNNLRK

SEQ ID NO: 123 - protein, 981 aa, Bactrocera dorsalis
  wtrw-Bdor
MENLGYKEGTAKPRRMARSISVVTKSELEQPLAGNNARFKSIPPNLMVRWRNNNADAMIEAQYPTPGEFEYMECGPSPPAESAPSMYDSFEEPTSELSVQICNDTLRISLIDQMKSAAGRVRFLEDIEQGNVIKDNTKAHFESASKIEKNLSYLWAAFLKRWDLLQSFLDIGAELNFCDQNGISALHLGAFSGCLSTLSFLVGQSMNVNLQPKCYTPLHCAAFGNSAEAAKFLINNGALITIDTNKPNCEESLLHCAVRANALECVKLFIVEGADVNSLKPNGTNAIHLAADLGNAQCLEALLSAPGADANVRICIREKESTALHLAADEGNVECVDLLLAKGADAKLKNHRGFTALHLAARTSSLECVESLLRNGNADPNAEDFDHRTPLHAAIGKSENAFDILELLIQWGANVNHKDIYGFTALHLAALDGLAQSVEMLIFHGADVTTKSKKGTSALNVITRKTPASVAMIRQKLDAAITLHHSQDPVNREVELELDFRQLLQHCHPREISYLNTFVDEGQKEILEHPLCSSFLYIKWGKIRKYYIGRLIFCFTFVLFLTLYVLTALAHNCYNGSKDDNTTIQAKELCQKQSILGDMLRNNPFVMEMQWWVLVAITIVEIFRKLYGITGYSTFKHYVTQVENIMEWFVITSVFIISYIYTNKTYTFQNHIGAFAVLLGWTNLMLMIGQLPVFDVYVAMYTRVQGEFAKLFMAYSCMLIGFTISFCVIFPSSSSFANPFMGFITVLVMMIGEQDLSLLINDPDGKDPPFLLEVSAQITFVLFLLFVTIILMNLLVGIAVHDIQGLKKTAGLSKLVRQTKLISYIESALFNGYLPPWLRNLLHYTALVSPQAYRVVLCVKPLNPSEKRLPREILMKAYEVGKMRKHFGHTISAKGTAATYLQYKNKYNDNQTQNYSMDDLETTHFNTLTTKIDENAERIEFLTQEIQELKQALITQQQQASKVIDKLLIVISNQQKNNLRK

SEQ ID NO: 124 - protein, 981 aa, Zeugodacus cucurbitae
  wtrw-Zcuc
MENLGYKEGTAKPRRMARSISVVTKSELEQPLTGNNARFKSIPPNLMVRWRNNNVDAMIEAQYPTPGEFEYMECGPSPPAESAPSMYDSFEEPTSELSVQICNDTLRISLIDQMKSTAGRVRFLEDIEQGNVIKDNTKTHFESASKLEKNLSFLWAAFLKRWDLLQSFLDIGAELNFCDQNGFSALHLGAFSGCLSTLSFLVGQSMNVNLQSKCYTPLHCAAFGNSAEAAKFLINNGALVTIDTNKPNCEESLLHCAVRANALECVKLFIVEGADVNSLKPNGTNAIHLAADLGNAQCLEALLNAPGADANVRICIREKESTALHLAADEGNVECVDLLLAKGADAKLKNHRGFTALHLAARTSSLECVESLLRNGNADPNAEDFDHRTPLHAAVGKSENAFDILETLIQWGANVNHKDIYGFTALHLAALDGLAQCVEMLIFHGADVTTKSKKGTSALNVITRKTPASVAMIRQKLDAAITLHHSQDPVNREVELELDFRQLLQHCHPREISYLNTFVDEGQKEILEHPLCSSFLYIKWGKIRKYYVGRLIFCFTFVLFLTLYVLTALAHNCYNGSKDDNTTIQAQELCQKQSILGDMLRNNPFVIEMQWWVLVAITVVEIFRKLYGITGYSTFKHYVTQVENIMEWFVITSVFIISHIYTNKTYTFQNHIGAFAVLLGWTNLMLMIGQLPVFDVYVAMYTRVQGEFAKLFMAYSCMLIGFTISFCVIFPSSSSFANPFMGFITVLVMMIGEQDLSLLINDPDGKDPPFLLEVSAQITFVLFLLFVTIILMNLLVGIAVHDIQGLKKTAGLSKLVRQTKLISYIESALFNGYLPPWLRNLLHYTALVSPQAYRVVLCVKPLNPSEKRLPREILMKAYEVGKMRKHFGHTISAKGTAATYLQYKNKYNDNQTQNYSMNDMETVHFNTLTTKIDENAERIEFLTQEIQELKQALITQQQQASKVIDKLLIVISNQQKNNLRK

SEQ ID NO: 125 - protein, 981 aa, Ceratitis capitata
  wtrw-Ccap
MENLGYKEGTAKPRRMARSISVVTKSELEQPLVGNNARFKSIPPNLMVRWRNNNADAMIEAQYPTPGEFEYMECGPSPPAESAPSMYDSFEEPTSELSVQICNDTLRISLIDQMKSAAGRVRFLEDIEQGNVISENAKTHFESASKIEKNLSYLWAAFLKRWDLLQSFLDIGAELNFCDQNGISALHLGAFSGCLSTLSFLIGKSMNINLQPKCYTPLHCAAFGNSAEAAKFLINNGALITIDTNKPNCEESLLHCAVRANALECVQLFIVEGADVNSLKPNGTNAIHLAADLGNAQCLEALLNAPGADANVRICIREKESTALHLAADEGNVECVDLLLAKGADAKLKNHRGFTALHLAARTSSLECVESLLRNGSADPNAEDFDHRTPLHAAVGKSENAFDILETLIQWGANVNHKDIYGFTALHLAALDGLAQCVEMLIFHGADVTTKSKKGTSALNVITRKTPASVAMIRQKLDAAITLHHSQDPVNREVELELDFRQLLQHCHPREISYLNTFVDEGQKEILEHPLCSSFLYIKWGKIRKYYIGRLIFCFTFVLFLTLYVLTALAHNCYNGSKDDNTTIQAQELCQKQSILGDMLRNNPFVMEMQWWVLVAITIVEIFRKLYGITGYSTFKHYVTQVENIMEWFVITSVFVISYIYTKQTYTFQNHIGAFAVLLGWTNLMLMIGQLPVFDVYVAMYTRVQGEFAKLFMAYSCMLIGFTISFCVIFPSSSSFANPFMGFITVLVMMIGEQDLSLLINDPDGKDPPFLLEVSAQITFVLFLLFVTIILMNLLVGIAVHDIQGLKKTAGLSKLVRQTKLISYIESALFNGYLPPWLRNLLHYTALVSPQAYRVVLCVKPLNPSEKRLPREILMKAYEVGKMRKHFGHTISAKGTAATYLQYKNKYNDNQAQNYAVDDLEAAHFNTITAKIDDNAERIEFLTQEIQELKQALITQQQQASKVIDKLLIVISNQQKNNLRK

SEQ ID NO: 126 - protein, 986 aa, Drosophila melanogaster
  wtrw-Dmel
MENLGYKEGSTKPRRMTRSISVVTKTEVEQPLTENNANNRFKSIPPNLMVRWRNNTDAMIEAQYPTAGEFEYMECGPSPPAESAPSMYDSFEEPTSELSVQICNDTLRISLIDQMKSAAGRVKLFEDIEQSNVVAEGIRTHFESASKLEKNLCYLWAAYLKRWDLIESLLEAGADLHFCDQNGISALHLSAFSGCLATLGLLVAKGLNVNLQSKCYTPLHCAAFGNAAEAAKLLINNGADISKDTSKPNCEESLLHCAVRSNALECLQIFIAEGADVNSLKPNGTNAIHLAADLGNIQCLEALLNAPNADANVRICIREKESTALHLAADEGNVECVDLLLAKGADAKLKNHRGFTPLHLAARTSSLDCVESLLRNGNADANAEDFDHRTPLHAAVGKSENAYDIMETLIQWGANVNHKDIYGFTALHLAALDGLVQCVEMLIFHGADVTTKSKKGTSALNVITRKTPASVAMIRQKLDAAITLHHSQDPVNREVELELDFRQLLQHCHPREISYLNTFVDEGQKEILEHPLCSSFLYIKWGKIRKYYIGRLIFCFSFVLFLTLYVLTALAHNCYNGSKNDNTTIPAQELCQKQSILGDMLRNNPFVMEMQWWVLVAITIVEIFRKLYGITGYSSFRHYVTQVENIMEWFVITSVFVISYIYTNKTYTFQNHIGAFAVLLGWTNLMLMIGQLPVFDVYVAMYTRVQGEFAKLFMAYSCMLIGFTISFCVIFPSSSSFANPFMGFITVLVMMIGEQDLSLLINDPEGKDPPFLLEVSAQITFVLFLLFVTIILMNLLVGIAVHDIQGLKKTAGLSKLVRQTKLISYIESALFNGYLPTWLRNLLHYTALVSPQAYRVVLCVKPLNPSEKRLPREILMKAYEVGKMRKHFGHTISSKNSAENYLSYKNKYNNNNGATTGYVLPDSDPDAGQFTTLTTKIDDNADRIEFLTQEIQELKQALISQQQQASKVIDKLLIVISNQQKQNLRK

1. A method for determining whether or not a candidate compound is a modulator of a complex consisting of an insect transient receptor potential channel Nanchung protein and an insect transient receptor potential channel Water witch protein, the method comprising:
(a) providing a first cell co-expressing the insect transient receptor potential channel Nanchung protein and the insect transient receptor potential channel Water witch protein;
(b) contacting the first cell with the candidate compound; and
(c) assaying for a modulation of the complex, wherein the modulation identifies the candidate compound as a modulator of the complex.

2. The method of claim 1, wherein the assaying step comprises at least one of the following steps:
(1) detecting calcium ion mobilization in the first cell in response to the candidate compound; or
(2) detecting a membrane potential in the first cell in response to the candidate compound.

3. The method of claim 1, wherein the assaying step comprises at least one of the following steps:
(1) comparing calcium ion mobilization in the first cell in the absence of the candidate compound with calcium ion mobilization in the first cell in the presence of the candidate compound; or
(2) comparing a membrane potential in the first cell in the absence of the candidate compound with a membrane potential in the first cell in the presence of the candidate compound.

4. The method of claim 1, wherein the assaying step comprises at least one of the following steps:
(1) comparing calcium ion mobilization in the first cell in the presence of the candidate compound with a calcium ion mobilization reference level indicative of no modulation of a complex consisting of an insect transient receptor potential channel Nanchung protein and an insect transient receptor potential channel Water witch protein; or
(2) comparing a membrane potential in the first cell in the presence of the candidate compound with a membrane potential reference level indicative of no modulation of a complex consisting of an insect transient receptor potential channel Nanchung protein and an insect transient receptor potential channel Water witch protein.

5. The method of claims 2-4, wherein the candidate compound modulates the calcium ion mobilization or the membrane potential in the first cell by at least 20% relative to the reference level.

6-24. (canceled)

25. A combination of expression vectors comprising:
(a) a first expression vector comprising a first nucleic acid molecule encoding a Nanchung protein, and
(b) a second expression vector comprising a second nucleic acid molecule encoding a Water witch protein.

26. (canceled)

27. The-combination of expression vectors of claim 25, wherein the first nucleic acid molecule comprises a nucleic acid sequence selected from SEQ ID NOS 1-27 and/or the second nucleic acid molecule comprises a nucleic acid sequence selected from SEQ ID NOS: 28-63.

28. (canceled)

29. An expression vector comprising:
(a) a first nucleic acid molecule encoding a Nanchung protein, and
(b) a second nucleic acid molecule encoding a Water witch protein.

30. (canceled)

31. The expression vector of claim 29 wherein the first nucleic acid molecule comprises a nucleic acid sequence selected from SEQ ID NOS: 1-27 and/or wherein the second nucleic acid molecule comprises a nucleic acid sequence selected from SEQ ID NOS: 28-63.

32. (canceled)

33. A cell comprising the expression vector of claims 29.

34. The cell of claim 33, wherein the Nanchung protein and the Water witch protein are co-expressed in the cell.

35-36. (canceled)

37. A method for determining whether a candidate compound binds directly to a complex consisting of an insect transient receptor potential channel Nanchung protein and an insect transient receptor potential channel Water witch protein, the method comprising:
(a) providing a complex consisting of an insect transient receptor potential channel Nanchung protein and an insect transient receptor potential channel Water witch protein;
(b) contacting the complex with a candidate compound; and
(c) determining a binding affinity of the candidate compound to the complex.

38-39. (canceled)

40. The method of claim 37, wherein the binding affinity is determined using one or more equilibrium binding constants, including K_{d} and/or Kᵢ.

41-63. (canceled)

64. A method for determining whether or not a candidate compound is a modulator of an insect transient receptor potential channel Water witch protein, comprising:
(a) providing a first cell expressing the insect transient receptor potential channel Water witch protein;
(b) contacting the first cell with the candidate compound; and
(c) assaying for a modulation of the insect transient receptor potential channel Water witch protein, wherein the modulation identifies the candidate compound as the modulator of the insect transient receptor potential channel Water witch protein.

65. The method of claim 64, wherein the assaying step comprises at least one of the following steps:
(1) detecting calcium ion mobilization in the first cell in response to the candidate compound; or
(2) detecting a membrane potential in the first cell in response to the candidate compound.

66. The method of claim 65, wherein the assaying step comprises at least one of the following steps:
(1) comparing calcium ion mobilization in the first cell in the absence of the candidate compound with calcium ion mobilization in the first cell in the presence of the candidate compound; or
(2) comparing a membrane potential in the first cell in the absence of the candidate compound with a membrane potential in the first cell in the presence of the candidate compound.

67. The method of claim 64, wherein the assaying step comprises at least one of the following steps:
(1) comparing calcium ion mobilization in the first cell in the presence of the candidate compound with a calcium ion mobilization reference level indicative of no modulation of the insect transient receptor potential channel Water witch protein; or
(2) comparing a membrane potential in the first cell in the presence of the candidate compound with a membrane potential reference level indicative of no modulation of an insect transient receptor potential channel Water witch protein.

68. The method of claim 65, wherein the candidate compound modulates the calcium ion mobilization or the membrane potential in the first cell by at least 20% relative to the reference level.

69. The method of claim 64, wherein the candidate compound is a modulator that inhibits the activity of the insect transient receptor potential channel Water witch protein.

70. The method of claim 64, wherein the candidate compound is a modulator that activates the insect transient receptor potential channel Water witch protein.

71-87. (canceled)

88. An expression vector comprising a nucleic acid molecule encoding a Water witch protein.

89. (canceled)

90. The expression vector of claim 88, wherein the nucleic acid molecule comprises a nucleic acid sequence selected from SEQ ID NOS: 28-63.

91. A cell comprising the expression vector of claim 88.

92-94. (canceled)
